(19) United States
(12) Patent Application Publication
(10) Pub. No.: US 2013/0231267 A1
(43) Pub. Date: Sep. 5, 2013

(54) ADENOVIRAL ASSEMBLY METHOD

(71) Applicant: SALK INSTITUTE FOR BIOLOGICAL STUDIES, La Jolla, CA (US)

(72) Inventors: Clodagh O'Shea, San Diego, CA (US); Colin Powers, San Diego, CA (US)

(73) Assignee: SALK INSTITUTE FOR BIOLOGICAL STUDIES, La Jolla, CA (US)

(21) Appl. No.: 13/769,025

(22) Filed: Feb. 15, 2013

Related U.S. Application Data
(63) Continuation of application No. PCT/US2011/048006, filed on Aug. 16, 2011.
(60) Provisional application No. 61/374,198, filed on Aug. 16, 2010.

(51) Int. Cl. C12N 15/861

(52) U.S. Cl. CPC C12N 15/861
USPC 506/17; 435/91.41

(57) ABSTRACT

Methods of assembling modified adenoviruses, libraries of adenoviral gene modules and compositions thereof are provided herein.

### CROSS-REFERENCE TO RELATED APPLICATIONS

[0001] This application is a continuation application of PCT Application No. PCT/US2011/048006, filed Aug. 16, 2011, which applications claims the benefit of U.S. Provisional Application No. 61/374,198 filed Aug. 16, 2010, which are hereby incorporated in their entirety and for all purposes.

### BACKGROUND OF THE INVENTION

[0002] There are 52 human Adenoviruses which infect different human tissues and hundreds of adenoviruses that infect other species ranging from fish to primates. These viruses are highly efficient nanomachines that deliver their genomic payload to the nucleus within an hour of infection. As DNA viruses, they do not integrate into host DNA, they can be produced to high titres using established GMP protocols, and they have demonstrated safety in research and human gene therapy applications for the expression of ectopic genes. However, to date, their potential applications have been hindered by the almost exclusive use of one variety, Ad5 or an Ad2/5 chimera and the inability to engineer and combine multiple genetic modifications rapidly and systematically. Thus, there is a great need to extend the repertoire adenoviral vectors beyond that of Ad2/5 and to develop a technological platform that facilitates the rapid, de novo assembly of novel adenoviral genomes from component parts, allowing the systematic incorporation of multiple modifications and heterologous elements. Such a system would take advantage of the natural viral architecture, which is highly efficient in both delivering and expressing 36 genes (not including splice variants). The system could provide powerful diagnostic agents and therapeutic agents that incorporate multiplex and quantitative measurements of the pathway activities deregulated in different tumor samples.

[0003] The potential of adenoviral vectors in several applications is hindered by the ability to manipulate the 36 kb viral genome rapidly and systematically. Furthermore, the adenoviral vectors used in basic research, animal models, gene therapy and oncolytic therapy are limited to Adenovirus (Ad) serotypes 2 and 5. Ad2 and Ad5 were among the first to be discovered and, as such, there is a legacy of vectors/tools with which to manipulate their genomes, particularly in the E1 region. Ad2/5 Fiber proteins infect epithelial cells by binding to the receptor, CAR. Unfortunately, CAR is not expressed on all cell types and is downregulated on many metastases. Furthermore, approximately 80% of the human population has pre-existing neutralizing antibodies against Ad2/5, which together with off-target liver uptake and inflammation, limits systemic applications. Thus, the use of Ad2/5 vectors for gene delivery and cancer therapy is not necessarily an optimal choice, quite the contrary, but largely an accident of history.

[0004] Our ultimate goal is to engineer potent viral cancer therapies that not only undergo tumor selective lytic replication but which can be administered systemically in repeated rounds of treatment, avoid liver toxicity, efficiently target and cross the torturous tumor vasculature, infect cells via disparate receptors, generate a tumor bystander effect by localized expression of pro-drug activating enzymes/toxins within the tumor and which reawaken a beneficial host anti-tumor immune response. These are major challenges which are further compounded by the inability of human adenovirus to replicate in mice. This precludes the evaluation of human oncolytic viruses in immune competent genetically engineered mouse models of cancer (GEMMs) which have many advantages over xenograft models.

[0005] There are 52 human adenoviruses, indicating highly specialized adaptation for infecting and replicating in different host tissue environments. Many of these viruses infect different tissues and have Fiber proteins that bind cellular receptors other than CAR as well as a distinct cohort of ‘E3’ immune-modulation genes. Their unique properties have not been extensively studied or exploited due to the lack of tools necessary to modify their genomes. Similarly, there are also adenoviruses that infect other species, including mouse adenovirus (MAV-1).

[0006] Provided herein are solutions to these and other problems in the art.

### BRIEF SUMMARY OF THE INVENTION

[0007] In one aspect, a method is provided for making a recombinant adenovirus (also referred to herein as “Adsembly”). The method includes assembling a nucleic acid from two or more adenoviral gene modules selected from an E1 module, an E2-L2 module, an L3-L4 module, an E3 module, an E4 module, or an adenoviral macromodule (or mutant thereof as described below).

[0008] In another aspect, a library including a plurality of adenoviral gene modules are provided.

[0009] In another aspect, kits are provided for practicing the methods provided herein.

### BRIEF DESCRIPTION OF THE DRAWINGS

[0010] FIG. 1. A comparison chart of the existing adenovirus vector methods and Adsembly. There are several limitations with the current systems that Adsembly overcomes.

[0011] FIG. 2. Challenges that need to be overcome to further develop adenoviruses as therapeutics. A simple diagram indicating some of the major problems that need to be overcome in the field.

[0012] FIG. 3. A phylogenetic tree listing the four different adenovirus genera. Not all known Adenoviruses are listed. This demonstrates the variety of species in the adenovirus family.

[0013] FIG. 4. Receptors and tropisms for the 52 known human adenoviruses. Receptors and tropisms vary between serotypes and subgroups, and can thus be exploited for retargeting certain viruses.

[0014] FIG. 5. Conservation of a “core” genomic region across adenovirus genera. The top of the figure is a simplified map of the human Ad5 genome (SEQ ID No:137), with the core region highlighted in dashed box. This core region is conserved throughout all adenovirus genera, as indicated by the white boxes around the genes in the bottom figure. All genera share this core region, with almost all of the core open reading frames present from the IVa2 (left end) through the pVIII (right end). The genomic variability lies at the ends of the genomes. Applicants have divided our module names into an E1 module (also referred to herein as a E1-like module) (everything left of the core, denoted by a bar), a core module (denoted by a bar), and an E3 module (also referred to herein as an E3-like module) (everything to the right of the core, denoted by a bar), since the content of the modules will vary somewhat between species, but their position relative to the core will not. In some cases, the fiber protein is immediately next to the core, while in others (human Ads) it is outside the core.

[0015] FIG. 6. Transcriptional maps from various adenovirus genera showing conservation of transcriptional units across adenovirus species. Core genes are shown, as are genes found in one or two genera. This figure provides a view of the variability at the ends of the genomes between genera. “Davison, Benko, Harrach” as recited herein refers to Benko M et al., (2005) Family Adenoviridae. Fauquet C M, Mayo M A, Maniloff J, Desselberger U, Ball L A (eds): Virus Taxonomy. VIIIth Report of the International Committee on Taxonomy of Viruses. Elsevier, New York pp 213-228.

[0016] FIG. 7A-7C. Alignment of amino acids 966-1103 of the human Ad5 polymerase protein as set forth in SEQ ID NO:32 (on the bottom, just above the consensus) with the corresponding regions in several polymerase proteins from non-human adenoviruses. Any of the non-human Ad sequences are at least 45% identical within this region when individually compared to the Ad5 polymerase sequence. Labels on the left indicate GenBank accession number and correspond to SEQ ID NO:1-32 in order top to bottom, respectively.

[0017] FIG. 7D-7G. Alignment of amino acids 501-747 of the human Ad5 hexon protein as set forth in SEQ ID NO:73 (on the bottom, just above the consensus) with the corresponding regions in several hexon proteins from non-human adenoviruses. Any of the non-human Ad sequences are at least 45% identical within this region when individually compared to the Ad5 hexon sequence. Residues highlighted in yellow are 100% conserved across species. Labels on the left indicate GenBank accession numbers and correspond to SEQ ID NO:33-73 in order top to bottom, respectively.

[0018] FIG. 7H-7I. Alignment of amino acids 408-475 of the human Ad5 DNA-binding protein as set forth in SEQ ID NO:103 (DBP, on the bottom, just above the consensus) with the corresponding regions in several DBPs from non-human adenoviruses. Any of the non-human Ad sequences are at least 35% identical within this region when individually compared to the Ad5 DBP sequence. Residues highlighted in yellow are 100% conserved across species. Labels on the left indicate GenBank accession numbers and correspond to SEQ ID NO:74-103 in order top to bottom, respectively.

[0019] FIG. 7J. Alignment of amino acids 6-43 of the human Ad5 pVIII protein as set forth in SEQ ID NO:135 (on the bottom, just above the consensus) with the corresponding regions in several pVIII proteins from non-human adenoviruses. Any of the non-human Ad sequences are at least 35% identical within this region when individually compared to the Ad5 pVIII sequence. Labels on the left indicate GenBank accession numbers and correspond to SEQ ID NO:104-135 in order top to bottom, respectively.

[0020] FIG. 8. An overview of the initial concept for adenovirus genomic manipulation.

[0021] FIG. 9. A simple diagram of an example of multisite gateway using four DNA fragments. Multisite gateway was our proposed system to reassemble genomes. On the left is a proposed system.

[0022] FIG. 10A. A diagram detailing nomenclature and organization of gateway att recombination sites. There are four different att recombination sites that result from Gateway cloning. All four contain a central attB region of 21 bp, which is where the actual recombination takes place. attP sites recombine with attB sites with a specific enzyme mix (BP). The resultant reaction creates attL and attR sites. This reaction is reversible with another enzyme mix (LR), where attL and attR recombine to form attP and attB.

[0023] FIG. 10B. Sequence differences between the 6 different att sites. Each site specifically recombines with its match. attB1 sites will only recombine with attP1 sites, attB2 only with attP2, etc.

[0024] FIG. 11. A) An example of the division of human Ad5 genome (SEQ ID NO:137) into modules for reassembly. B) Locations of attB site insertions after reassembly of the proposed modules using multisite gateway technology.

[0025] FIG. 12. Examples of potential attB insertion sites within the human Ad5 genome (SEQ ID NO:137). Insertion sites can be determined by alignment of various adenovirus sequences within the targeted region and choosing places around non-conserved sequences. Arrows indicate chosen sites for Ad5. A) attB4 insertion between E1 and E2 modules. B) attB6 insertion site between E2 and L3 modules. C) attB5 insertion between L3 and E3 modules. D) attB3 insertion site between E3 and E4 modules. For this particular insertion, it was decided to buffer the recombination site by duplicating the Ad5 sequence between the fiber polyA/stop and the E4 polyA. Thus, along with the attB insertion is a duplication of the 27 bp located between those two elements.

[0026] FIG. 13. Challenges and results of trying to obtain the five Ad5 modules by PCR. The table on the bottom lists the results of sequencing each fragment obtained by PCR and the differences with published Ad5 sequence. Since the reproducibility of all the errors was 100%, that suggests the template we used differs from the published Ad5 sequence, and the PCR fidelity is high.

[0027] FIG. 14. The Ad5 adenoviral gene modules can be obtained by PCR from DNA obtained directly from purified virus. Ad5 genomic DNA was isolated directly from purified virus and used as template for the Ad5 module PCRs. All five PCRs were successful. Left panel: E2 and L3 module PCRs in quadruplicate. Right panel: E1, E3, and E4 module PCRs in duplicate. Red arrows indicate the desired PCR products. Arrows are omitted on the right since the desired products are so clear.

[0028] FIG. 15. Efficiencies of the Ad5 adenoviral gene modules in gateway BP reactions. The E1, E2, and L3 modules were not efficient in the standard reactions, while the E3 and E4 modules were.

[0029] FIG. 16. Diagrams for sequence and ligation independent cloning (SLIC). The left is for single-fragment SLIC, while the right is an example of multi (9) fragment SLIC.

[0030] FIG. 17. The use of SLIC to create gateway entry vectors without using gateway cloning enzymes.

[0031] FIG. 18. The Ad5 E1 region is moderately toxic to bacteria. The Ad5 E1 region or a control (lacZ) were inserted into the gateway DONR vectors using SLIC. All the colonies on the lacZ control were “normal” sized, and positive for lacZ insertion. Only two “normal” sized colonies appeared on the E1 plate, and both were negative for E1. However, several smaller colonies were present (arrows), all of which were positive for E1. Thus, the Ad5 E1 region slows the growth of bacteria. This explains why we had problems inserting E1 using gateway recombination reactions.

[0032] FIG. 19. Initial multisite gateway strategy for reassembly of Ad5 genomes from the five module entry vectors. First, 3 of the 5 entry vectors were combined along with a stuffer vector. The stuffer was then removed to insert a counterselection cassette. The final 2 entry vectors were then combined to create the complete genome. This particular strategy showed toxicity associated with the E1 module and the large size of the E2 and L3 modules.

[0033] FIG. 20. Creation of the human Ad5 Adsembly dual DEST vector. The E2 and L3 modules are obtained by PCR from their respective entry vectors and are combined with a vector backbone using SLIC. Subsequently, gateway counterselection cassettes are inserted flanking the modules by SLIC after digesting the vector with unique restriction sites engineered at the ends of the modules.

[0034] FIG. 21. An Adsembly process for human Ad5. The core module dual DEST vector is combined with one of each of the remaining 3 entry vectors in a gateway LR reaction to reassemble a complete viral genome.

[0035] FIG. 22. Efficiencies of several counterselection markers attempted with the Adsembly method. PheS+ccdB is used and is efficient either by blind screen of colonies, or by first using colony PCR to identify insertions followed by standard restriction digest screening.

[0036] FIG. 23. An Adsembly vector backbone contains two unique features for embodiments of the method. The vector backbone uses a p15A origin of replication, which lowers the copy number of the plasmid, thus reducing the toxicity mediated by the Ad5 E1 module. Additionally, the vector contains a mammalian I-SceI expression cassette, which allows for self-excision of the viral genome from the vector backbone upon transfection.

[0037] FIG. 24. Efficiencies of the Adsembly reaction. A) An Adsembly reaction for Ad5 was performed using 20 fmol of the core dual DEST vector and 10 fmol each of E1 module, E3 module, and E4 module entry vectors. The reaction was carried out at room temperature overnight, and transformed into NEB10-β cells the following day. Sixteen clones were grown and prepared for screening by EcoRV digest. Two of the 16 clones showed the correct restriction digest pattern (stars, clones 4 and 8). “L” is the DNA ladder. “(−)” is a negative control, the digested core dual DEST vector by itself “(+)” is a positive control, a digested complete Ad5 genome. B) Increasing the amount of E1 entry vector improves Adsembly efficiency. An Adsembly reaction for Ad5 was performed using 20 fmol of the core dual DEST vector, 50 fmol of an E1 module entry vector and 10 fmol each of E3, and E4 module entry vectors. The reaction was carried out at room temperature overnight, and transformed into NEB10-β cells the following day. Ten clones were grown and prepared for screening by EcoRV digest. Seven of the 10 clones showed the correct restriction digest pattern (red stars). “L” is the DNA ladder. “(−)” is a negative control, a digested Ad5 E2-E4 vector. “(+)” is a positive control, a digested complete Ad5 genome.

[0038] FIG. 25. The method of AdSlicR for human Ad5. Beginning with the E2-L3 core module created for Adsembly, the vector is linearized by SwaI digestion. The E3 and E4 modules are then inserted into the vector using SLIC. The subsequent vector is linearized with Pad, followed by insertion of the E1 module by SLIC, creating a complete genome.

[0039] FIG. 26. Efficiencies in the human Ad5 AdSlicR method. Colony PCR is used as a first line of screening followed by restriction digest of PCR positive clones.

[0040] FIG. 27. The Adsembled virus grows in tissue culture. A) A plaque created by a replicating Adenovirus that was assembled by Adsembly. The Adsembled genome was transfection into 293 cells, and visible plaques appeared by day 7. B) Passaging and continued growth of Adsembled Ad5. Total virus from a transfection of Adsembled Ad5 was collected and replated onto fresh 293 cells. Clear cytopathic effect across the whole plate was visible by day 3.

[0041] FIG. 28. Adsembled Ad5 has only a slight decrease in titers when grown in 293 cells. 293 cells were infected at an MOI=10 with either wild-type Ad5, Adsembled Ad5, or AdSLIC Ad5 containing either no attB insertions or each of four attB insertions individually. Total virus was collected after 48 hours and titered by ELISA. The only viruses that show any defect are the Adsembled virus and the AdSLIC virus containing only the attB3 insertion. Both show a modest 2-fold decrease compared to wild-type levels. These data also demonstrate that viruses created using AdSLIC have no replication defect in 293 cells. Input levels for all viruses were titered and were near 1e7 IU/mL (not shown).

[0042] FIG. 29. FIG. 29A sets forth vectors in an Adsembly entry vector library as described herein. Ad serotypes from which the modules were derived are listed first, followed by any changes to the vector. If no changes were made, the entry is denoted “wild-type.” FIG. 29B sets forth macromodule vectors for Adsembly and AdSLIC as described herein. Ad serotypes from which the macromodules were derived are listed first, followed by the modules that comprise the macromodule, followed by any changes to the vector. If there were no changes, it is denoted “wild-type.” FIG. 29C sets forth Adenovirus genomes assembled using Adsembly or AdSLIC as described herein. Ad serotypes from which the genomes are based are listed first, followed by any changes to the virus. If there were no changes, it is denoted “wild-type.”

[0043] FIG. 30. Insertion of entire genomes into plasmids using SLIC. A) A schematic of the procedure, whereby a plasmid vector is obtained by PCR containing short (˜20 bp) of homology to the ends of the viral genome to be inserted. Both the genome and vector are then treated with T4 DNA polymerase and used in SLIC as normal. B) Example of the insertion of the entire Ad5 genome into a plasmid backbone. All six clones that were screened contained the entire genome. Since the genomes can insert either forward or reverse, in this case four were in one orientation (clones 1, 4, 5, and 6) and two were in the other orientation (clones 2 and 3).

[0044] FIGS. 31-33 illustrate methods of adenoviral genome modification.

[0045] FIG. 34. Top panel: Example of genome assembly of a non-human adenovirus, mouse adenovirus type 1 (SEQ ID NO:104), using an AdSLICr system. The E1, E3-fiber, and E4 module plasmids are designed such that they can be excised with restriction enzymes that leave the exact overhang needed for sequence and ligation independent cloning (SLIC) into the linearized (with either SwaI or PmeI) core vector. This eliminates the need for PCR to obtain the linear fragment needed for SLIC, thus erasing the potential to introduce errors. It is also designed such that no foreign sequence is inserted into the final genome construct. The typical method involves excising the E3-fiber and E4 modules and combining with the PmeI-linearized core vector. This creates an E2-E4 macromodule which can then be cut with SwaI and combined with excised E1 modules to create a complete genome. Bottom panel: A wild-type mouse adenovirus type 1 was assembled using the above strategy and infectious virus forming plaques was obtained after transfection of mouse 3T6 cells.

[0046] FIG. 35. Growth analysis of viruses containing single attB recombination site insertions in order to identify insertion sites that hinder growth. Since virus created using Adsembly carried a slight growth defect compared to wild type virus (FIG. 28), viruses were created using AdSLIC such that they contained only one of each the attB insertions present in viruses created using Adsembly. 293 cells (top graph) were infected at an MOI=10. U2OS cells (bottom graph) were infected at an MOI=50. Total virus was collected 48 hours later and titered. While the attB5 insertion between modules [L3] and [E3] does not hinder growth compared to wild type virus in U2OS cells, the attB insertions at the other three junctions did inhibit growth compared to wild type.

[0047] FIG. 36. Since the initial attB4 insertion site between the E1 and E2-L2 modules caused growth defects (FIG. 35), alternate placement options were designed. Base pair positions refer to positions as set forth in SEQ ID NO:137.

[0048] FIG. 37. Since the initial attB3 insertion site between the E3 and E4 modules caused growth defects (FIG. 35), an alternate placement was designed. Base pair positions refer to positions as set forth in SEQ ID NO:137.

[0049] FIG. 38. U2OS cells were infected with virus at MOI=50 and total virus collected and titered after 48 hours. Three viruses created using Adsembly are compared to wild-type virus. Viruses that contain the alternate attB site insertions (black diamonds and triangles) have improved growth compared to the original attB site placements (black X's). All these viruses lack an attB site located between the L2 and L3 modules and contain the attB insertion between the L3 and E3 modules that does not affect growth.

[0050] FIG. 39. Adsembly can be used to create viruses where transgenes are expressed from the E1 module. In this case, the E1A and E1B genes of Ad5 were replaced with a GFP expression cassette in the E1 module. Virus was assembled using Adsembly, and viable GFP-expressing virus was obtained.

[0051] FIG. 40. Adsembly can be used to create viruses where transgenes are expressed from the E3 module using the natural viral transcriptional architecture. The E3 module was modified to delete the 11.6K protein (Ad5 nucleotide 29491-29772) and put mCherry in its place. The E3 transcript then naturally splices to the mCherry gene and protein is expressed. The virus was created using Adsembly, and a transduction of U2OS cells is shown. This is an example of 1) transgene expression from the E3 module, and 2) using the natural viral transcriptional architecture to express foreign genes.

[0052] FIG. 41. Using the native viral transcriptional architecture to express multiple transgenes from the E4 module. The native E4 promoter was replaced with the CMV promoter, and 3 native E4 genes were replaced with transgenes. Adsembly was then used to create the virus. Base pair positions refer to positions as set forth in SEQ ID NO:137.

[0053] FIG. 42. Adsembly can be used to create viruses where multiple transgenes are expressed from the E4 module using the native viral transcriptional architecture. The virus created in FIG. 41 was transduced into U2OS cells for 24 hrs, total RNA was collected, cDNA was synthesized from RNA using random priming, and PCR performed to test splicing to the mCherry gene. The black arrow indicates the unspliced transcript, which will express GFP. The white arrow indicates the spliced transcript, which will express mCherry. This demonstrates multiple foreign genes can be expressed from a single module. Lanes 1 and 2 are negative controls of untransduced cells or cells infected with wild type Ad5, respectively.

[0054] FIG. 43. Incorporating multiple types of changes across multiple modules in single genome assemblies using Adsembly. A diagram displaying the five modules of the Ad5 genome with vertical arrows indicating the changes made to each module prior to full genome assembly. The E1 module was converted into a transgene expression cassette for a luciferase-GFP fusion protein. The hexon protein in the L3 module was altered at Glu 451 to Gln by point mutation. A portion of the native Ad5 fiber in the E3 module was replaced with one of several fiber portions from other human adenovirus serotypes. Six viruses were created using Adsembly, each with an alternate fiber protein. Base pair positions listed for Ad5 refer to positions as set forth in SEQ ID NO:137. Accession numbers DQ086466, AJ854486, BK001453, NC_{—}001460, and AY_{—}737797 correspond to SEQ ID NO:139-143, respectively.

[0055] FIG. 44. Fiber chimeric viruses created using Adsembly have improved transduction capacity in human embryonic stem cells (hESC) compared to the normal Ad5 fiber. Human ESC were transduced at various MOIs for 24 or 48 hours and GFP expression measured by microscopy. The top panel is a negative control with no virus. The second panel is “Ad5 CMV-GFP”, which expresses GFP under the CMV promoter. On the left indicate the virus fiber chimera tested (i.e., Ad5/3 is Ad5 with the Ad3 fiber knob). All images are taken at 5× magnification.

[0056] FIG. 45. Exchange of core modules between Adenovirus serotypes produces viable virus. A core module from Ad11 was created. The Ad5 E1 and E3 modules were modified to carry the Ad11 pIX and U exon-Fiber, respectively. Whole virus was assembled using AdSLIC, and virus reconstituted on 293 cells. The base pair positions that are noted in the “final virus” list are from as set forth in SEQ ID NO:137 (Ad5) and SEQ ID NO:141 (Ad11).

[0057] FIG. 46. Using AdSLIC to make mutations in viral genes in order to study their function in the context of virus infection. In the E1 module, the E1B-55K gene was mutated at the H is 260 position to Ala. All other modules were wild type. This virus was assembled using AdSLIC. Human small airway epithelial cells were infected at MOI=10 with either replication defective Ad5 (lane 1), wild type Ad5 (lane 2), or Ad5 H260A (lane 3). Total protein was collected at 36 hours post infection and analyzed by western blot for p53 (top panel), mdm2, Ad5 late proteins, and actin. Unlike the wild type Ad5, the Ad5-H260A virus is unable to degrade p53 and has a defect in production of late proteins.

### DETAILED DESCRIPTION OF THE INVENTION

### Definitions

[0058] “Nucleic acid” refers to deoxyribonucleotides or ribonucleotides and polymers thereof in either single- or double-stranded form, and complements thereof. The term encompasses nucleic acids containing known nucleotide analogs or modified backbone residues or linkages, which are synthetic, naturally occurring, and non-naturally occurring, which have similar binding properties as the reference nucleic acid, and which are metabolized in a manner similar to the reference nucleotides. Examples of such analogs include, without limitation, phosphorothioates, phosphoramidates, methyl phosphonates, chiral-methyl phosphonates, 2-O-methyl ribonucleotides, peptide-nucleic acids (PNAs).

[0059] Unless otherwise indicated, a particular nucleic acid sequence also implicitly encompasses conservatively modified variants thereof (e.g., degenerate codon substitutions) and complementary sequences, as well as the sequence explicitly indicated. Specifically, degenerate codon substitutions may be achieved by generating sequences in which the third position of one or more selected (or all) codons is substituted with mixed-base and/or deoxyinosine residues (Batzer et al., Nucleic Acid Res. 19:5081 (1991); Ohtsuka et al., J. Biol. Chem. 260:2605-2608 (1985); Rossolini et al., Mol. Cell. Probes 8:91-98 (1994)). The term nucleic acid is used interchangeably with gene, cDNA, mRNA, oligonucleotide, and polynucleotide.

[0060] A particular nucleic acid sequence also implicitly encompasses “splice variants.” Similarly, a particular protein encoded by a nucleic acid implicitly encompasses any protein encoded by a splice variant of that nucleic acid. “Splice variants,” as the name suggests, are products of alternative splicing of a gene. After transcription, an initial nucleic acid transcript may be spliced such that different (alternate) nucleic acid splice products encode different polypeptides. Mechanisms for the production of splice variants vary, but include alternate splicing of exons. Alternate polypeptides derived from the same nucleic acid by read-through transcription are also encompassed by this definition. Any products of a splicing reaction, including recombinant forms of the splice products, are included in this definition. An example of potassium channel splice variants is discussed in Leicher, et al., J. Biol. Chem. 273(52):35095-35101 (1998).

[0061] Construction of suitable vectors containing the desired therapeutic gene coding and control sequences may employ standard ligation and restriction techniques, which are well understood in the art (see Maniatis et al., in Molecular Cloning: A Laboratory Manual, Cold Spring Harbor Laboratory, New York (1982)). Isolated plasmids, DNA sequences, or synthesized oligonucleotides may be cleaved, tailored, and re-ligated in the form desired.

[0062] Nucleic acid is “operably linked” when it is placed into a functional relationship with another nucleic acid sequence. For example, DNA for a presequence or secretory leader is operably linked to DNA for a polypeptide if it is expressed as a preprotein that participates in the secretion of the polypeptide; a promoter or enhancer is operably linked to a coding sequence if it affects the transcription of the sequence; or a ribosome binding site is operably linked to a coding sequence if it is positioned so as to facilitate translation. Generally, “operably linked” means that the DNA sequences being linked are near each other, and, in the case of a secretory leader, contiguous and in reading phase. However, enhancers do not have to be contiguous. Linking is accomplished by ligation at convenient restriction sites. If such sites do not exist, the synthetic oligonucleotide adaptors or linkers are used in accordance with conventional practice.

[0063] The terms “identical” or percent “identity,” in the context of two or more nucleic acids or polypeptide sequences, refer to two or more sequences or subsequences that are the same or have a specified percentage of amino acid residues or nucleotides that are the same (i.e., about 60% identity, preferably 65%, 70%, 75%, 80%, 85%, 90%, 91%, 92%, 93%, 94%, 95%, 96%, 97%, 98%, 99%, or higher identity over a specified region, when compared and aligned for maximum correspondence over a comparison window or designated region) as measured using a BLAST or BLAST 2.0 sequence comparison algorithms with default parameters described below, or by manual alignment and visual inspection (see, e.g., NCBI web site or the like). Such sequences are then said to be “substantially identical.” This definition also refers to, or may be applied to, the compliment of a test sequence. The definition also includes sequences that have deletions and/or additions, as well as those that have substitutions. As described below, the preferred algorithms can account for gaps and the like. Preferably, identity exists over a region that is at least about 25 amino acids or nucleotides in length, or more preferably over a region that is 50-100 amino acids or nucleotides in length.

[0064] For sequence comparison, typically one sequence acts as a reference sequence, to which test sequences are compared. When using a sequence comparison algorithm, test and reference sequences are entered into a computer, subsequence coordinates are designated, if necessary, and sequence algorithm program parameters are designated. Preferably, default program parameters can be used, or alternative parameters can be designated. The sequence comparison algorithm then calculates the percent sequence identities for the test sequences relative to the reference sequence, based on the program parameters.

[0065] A “comparison window”, as used herein, includes reference to a segment of any one of the number of contiguous positions selected from the group consisting of from 20 to 600, usually about 50 to about 200, more usually about 100 to about 150 in which a sequence may be compared to a reference sequence of the same number of contiguous positions after the two sequences are optimally aligned. Methods of alignment of sequences for comparison are well-known in the art. Optimal alignment of sequences for comparison can be conducted, e.g., by the local homology algorithm of Smith & Waterman, Adv. Appl. Math. 2:482 (1981), by the homology alignment algorithm of Needleman & Wunsch, J. Mol. Biol. 48:443 (1970), by the search for similarity method of Pearson & Lipman, Proc. Nat'l. Acad. Sci. USA 85:2444 (1988), by computerized implementations of these algorithms (GAP, BESTFIT, FASTA, and TFASTA in the Wisconsin Genetics Software Package, Genetics Computer Group, 575 Science Dr., Madison, Wis.), or by manual alignment and visual inspection (see, e.g., Current Protocols in Molecular Biology (Ausubel et al., eds. 1995 supplement)).

[0066] A preferred example of algorithm that is suitable for determining percent sequence identity and sequence similarity are the BLAST and BLAST 2.0 algorithms, which are described in Altschul et al., Nuc. Acids Res. 25:3389-3402 (1977) and Altschul et al., J. Mol. Biol. 215:403-410 (1990), respectively. BLAST and BLAST 2.0 are used, with the parameters described herein, to determine percent sequence identity for the nucleic acids and proteins of the invention. Software for performing BLAST analyses is publicly available through the National Center for Biotechnology Information, as known in the art. This algorithm involves first identifying high scoring sequence pairs (HSPs) by identifying short words of length W in the query sequence, which either match or satisfy some positive-valued threshold score T when aligned with a word of the same length in a database sequence. T is referred to as the neighborhood word score threshold (Altschul et al., supra). These initial neighborhood word hits act as seeds for initiating searches to find longer HSPs containing them. The word hits are extended in both directions along each sequence for as far as the cumulative alignment score can be increased. Cumulative scores are calculated using, for nucleotide sequences, the parameters M (reward score for a pair of matching residues; always >0) and N (penalty score for mismatching residues; always <0). For amino acid sequences, a scoring matrix is used to calculate the cumulative score. Extension of the word hits in each direction are halted when: the cumulative alignment score falls off by the quantity X from its maximum achieved value; the cumulative score goes to zero or below, due to the accumulation of one or more negative-scoring residue alignments; or the end of either sequence is reached. The BLAST algorithm parameters W, T, and X determine the sensitivity and speed of the alignment. The BLASTN program (for nucleotide sequences) uses as defaults a wordlength (W) of 11, an expectation (E) of 10, M=5, N=−4 and a comparison of both strands. For amino acid sequences, the BLASTP program uses as defaults a wordlength of 3, and expectation (E) of 10, and the BLOSUM62 scoring matrix (see Henikoff & Henikoff, Proc. Natl. Acad. Sci. USA 89:10915 (1989)) alignments (B) of 50, expectation (E) of 10, M=5, N=−4, and a comparison of both strands.

[0067] The terms “polypeptide,” “peptide” and “protein” are used interchangeably herein to refer to a polymer of amino acid residues. The terms apply to amino acid polymers in which one or more amino acid residue is an artificial chemical mimetic of a corresponding naturally occurring amino acid, as well as to naturally occurring amino acid polymers and non-naturally occurring amino acid polymer.

[0068] The term “amino acid” refers to naturally occurring and synthetic amino acids, as well as amino acid analogs and amino acid mimetics that function in a manner similar to the naturally occurring amino acids. Naturally occurring amino acids are those encoded by the genetic code, as well as those amino acids that are later modified, e.g., hydroxyproline, γ-carboxyglutamate, and O-phosphoserine. Amino acid analogs refers to compounds that have the same basic chemical structure as a naturally occurring amino acid, i.e., an a carbon that is bound to a hydrogen, a carboxyl group, an amino group, and an R group, e.g., homoserine, norleucine, methionine sulfoxide, methionine methyl sulfonium. Such analogs have modified R groups (e.g., norleucine) or modified peptide backbones, but retain the same basic chemical structure as a naturally occurring amino acid. Amino acid mimetics refers to chemical compounds that have a structure that is different from the general chemical structure of an amino acid, but that functions in a manner similar to a naturally occurring amino acid.

[0069] Amino acids may be referred to herein by either their commonly known three letter symbols or by the one-letter symbols recommended by the IUPAC-IUB Biochemical Nomenclature Commission. Nucleotides, likewise, may be referred to by their commonly accepted single-letter codes.

[0070] “Conservatively modified variants” applies to both amino acid and nucleic acid sequences. With respect to particular nucleic acid sequences, conservatively modified variants refers to those nucleic acids which encode identical or essentially identical amino acid sequences, or where the nucleic acid does not encode an amino acid sequence, to essentially identical sequences. Because of the degeneracy of the genetic code, a large number of functionally identical nucleic acids encode any given protein. For instance, the codons GCA, GCC, GCG and GCU all encode the amino acid alanine. Thus, at every position where an alanine is specified by a codon, the codon can be altered to any of the corresponding codons described without altering the encoded polypeptide. Such nucleic acid variations are “silent variations,” which are one species of conservatively modified variations. Every nucleic acid sequence herein which encodes a polypeptide also describes every possible silent variation of the nucleic acid. One of skill will recognize that each codon in a nucleic acid (except AUG, which is ordinarily the only codon for methionine, and TGG, which is ordinarily the only codon for tryptophan) can be modified to yield a functionally identical molecule. Accordingly, each silent variation of a nucleic acid which encodes a polypeptide is implicit in each described sequence with respect to the expression product, but not with respect to actual probe sequences.

[0071] As to amino acid sequences, one of skill will recognize that individual substitutions, deletions or additions to a nucleic acid, peptide, polypeptide, or protein sequence which alters, adds or deletes a single amino acid or a small percentage of amino acids in the encoded sequence is a “conservatively modified variant” where the alteration results in the substitution of an amino acid with a chemically similar amino acid. Conservative substitution tables providing functionally similar amino acids are well known in the art. Such conservatively modified variants are in addition to and do not exclude polymorphic variants, interspecies homologs, and alleles of the invention.

[0072] The following eight groups each contain amino acids that are conservative substitutions for one another: 1) Alanine (A), Glycine (G); 2) Aspartic acid (D), Glutamic acid (E); 3) Asparagine (N), Glutamine (Q); 4) Arginine (R), Lysine (K); 5) Isoleucine (I), Leucine (L), Methionine (M), Valine (V); 6) Phenylalanine (F), Tyrosine (Y), Tryptophan (W); 7) Serine (S), Threonine (T); and 8) Cysteine (C), Methionine (M) (see, e.g., Creighton, Proteins (1984)).

[0073] The term “recombinant” when used with reference, e.g., to a cell, virus, nucleic acid, protein, or vector, indicates that the cell, virus, nucleic acid, protein or vector, has been modified by the introduction of a heterologous nucleic acid or protein or the alteration of a native nucleic acid or protein, or that the cell is derived from a cell so modified. Thus, for example, recombinant cells express genes that are not found within the native (non-recombinant) form of the cell or express native genes that are otherwise abnormally expressed, under expressed or not expressed at all.

[0074] The phrase “stringent hybridization conditions” refers to conditions under which a probe will hybridize to its target subsequence, typically in a complex mixture of nucleic acids, but to no other sequences. Stringent conditions are sequence-dependent and will be different in different circumstances. Longer sequences hybridize specifically at higher temperatures. An extensive guide to the hybridization of nucleic acids is found in Tijssen, Techniques in Biochemistry and Molecular Biology—Hybridization with Nucleic Probes, “Overview of principles of hybridization and the strategy of nucleic acid assays” (1993). Generally, stringent conditions are selected to be about 5-10° C. lower than the thermal melting point (Tₘ) for the specific sequence at a defined ionic strength pH. The Tₘ is the temperature (under defined ionic strength, pH, and nucleic concentration) at which 50% of the probes complementary to the target hybridize to the target sequence at equilibrium (as the target sequences are present in excess, at Tₘ, 50% of the probes are occupied at equilibrium). Stringent conditions may also be achieved with the addition of destabilizing agents such as formamide. For selective or specific hybridization, a positive signal is at least two times background, preferably 10 times background hybridization. Exemplary stringent hybridization conditions can be as following: 50% formamide, 5×SSC, and 1% SDS, incubating at 42° C., or, 5×SSC, 1% SDS, incubating at 65° C., with wash in 0.2×SSC, and 0.1% SDS at 65° C.

[0075] Nucleic acids that do not hybridize to each other under stringent conditions are still substantially identical if the polypeptides which they encode are substantially identical. This occurs, for example, when a copy of a nucleic acid is created using the maximum codon degeneracy permitted by the genetic code. In such cases, the nucleic acids typically hybridize under moderately stringent hybridization conditions. Exemplary “moderately stringent hybridization conditions” include a hybridization in a buffer of 40% formamide, 1 M NaCl, 1% SDS at 37° C., and a wash in 1×SSC at 45° C. A positive hybridization is at least twice background. Those of ordinary skill will readily recognize that alternative hybridization and wash conditions can be utilized to provide conditions of similar stringency. Additional guidelines for determining hybridization parameters are provided in numerous reference, e.g., and Current Protocols in Molecular Biology, ed. Ausubel, et al., John Wiley & Sons.

[0076] For PCR, a temperature of about 36° C. is typical for low stringency amplification, although annealing temperatures may vary between about 32° C. and 48° C. depending on primer length. For high stringency PCR amplification, a temperature of about 62° C. is typical, although high stringency annealing temperatures can range from about 50° C. to about 65° C., depending on the primer length and specificity. Typical cycle conditions for both high and low stringency amplifications include a denaturation phase of 90° C.-95° C. for 30 sec-2 min., an annealing phase lasting 30 sec.-2 min., and an extension phase of about 72° C. for 1-2 min. Protocols and guidelines for low and high stringency amplification reactions are provided, e.g., in Innis et al. (1990) PCR Protocols, A Guide to Methods and Applications, Academic Press, Inc. N.Y.).

[0077] As used herein, the term “cancer” refers to all types of cancer, neoplasm, or malignant tumors found in mammals, including leukemia, carcinomas and sarcomas. Exemplary cancers include cancer of the brain, breast, cervix, colon, head & neck, liver, kidney, lung, non-small cell lung, melanoma, mesothelioma, ovary, sarcoma, stomach, uterus and Medulloblastoma. Additional examples include, Hodgkin's Disease, Non-Hodgkin's Lymphoma, multiple myeloma, neuroblastoma, ovarian cancer, rhabdomyosarcoma, primary thrombocytosis, primary macroglobulinemia, primary brain tumors, cancer, malignant pancreatic insulanoma, malignant carcinoid, urinary bladder cancer, premalignant skin lesions, testicular cancer, lymphomas, thyroid cancer, neuroblastoma, esophageal cancer, genitourinary tract cancer, malignant hypercalcemia, endometrial cancer, adrenal cortical cancer, neoplasms of the endocrine and exocrine pancreas, and prostate cancer.

[0078] The term “leukemia” refers broadly to progressive, malignant diseases of the blood-forming organs and is generally characterized by a distorted proliferation and development of leukocytes and their precursors in the blood and bone marrow. Leukemia is generally clinically classified on the basis of (1) the duration and character of the disease-acute or chronic; (2) the type of cell involved; myeloid (myelogenous), lymphoid (lymphogenous), or monocytic; and (3) the increase or non-increase in the number abnormal cells in the blood-leukemic or aleukemic (subleukemic). The P₃₈₈ leukemia model is widely accepted as being predictive of in vivo anti-leukemic activity. It is believed that a compound that tests positive in the P₃₈₈ assay will generally exhibit some level of anti-leukemic activity in vivo regardless of the type of leukemia being treated. Accordingly, the present invention includes a method of treating leukemia, and, preferably, a method of treating acute nonlymphocytic leukemia, chronic lymphocytic leukemia, acute granulocytic leukemia, chronic granulocytic leukemia, acute promyelocytic leukemia, adult T-cell leukemia, aleukemic leukemia, a leukocythemic leukemia, basophylic leukemia, blast cell leukemia, bovine leukemia, chronic myelocytic leukemia, leukemia cutis, embryonal leukemia, eosinophilic leukemia, Gross' leukemia, hairy-cell leukemia, hemoblastic leukemia, hemocytoblastic leukemia, histiocytic leukemia, stem cell leukemia, acute monocytic leukemia, leukopenic leukemia, lymphatic leukemia, lymphoblastic leukemia, lymphocytic leukemia, lymphogenous leukemia, lymphoid leukemia, lymphosarcoma cell leukemia, mast cell leukemia, megakaryocytic leukemia, micromyeloblastic leukemia, monocytic leukemia, myeloblastic leukemia, myelocytic leukemia, myeloid granulocytic leukemia, myelomonocytic leukemia, Naegeli leukemia, plasma cell leukemia, multiple myeloma, plasmacytic leukemia, promyelocytic leukemia, Rieder cell leukemia, Schilling's leukemia, stem cell leukemia, subleukemic leukemia, and undifferentiated cell leukemia.

[0079] The term “sarcoma” generally refers to a tumor which is made up of a substance like the embryonic connective tissue and is generally composed of closely packed cells embedded in a fibrillar or homogeneous substance. Sarcomas which can be treated with a combination of antineoplastic thiol-binding mitochondrial oxidant and an anticancer agent include a chondrosarcoma, fibrosarcoma, lymphosarcoma, melanosarcoma, myxosarcoma, osteosarcoma, Abemethy's sarcoma, adipose sarcoma, liposarcoma, alveolar soft part sarcoma, ameloblastic sarcoma, botryoid sarcoma, chloroma sarcoma, chorio carcinoma, embryonal sarcoma, Wilms' tumor sarcoma, endometrial sarcoma, stromal sarcoma, Ewing's sarcoma, fascial sarcoma, fibroblastic sarcoma, giant cell sarcoma, granulocytic sarcoma, Hodgkin's sarcoma, idiopathic multiple pigmented hemorrhagic sarcoma, immunoblastic sarcoma of B cells, lymphoma, immunoblastic sarcoma of T-cells, Jensen's sarcoma, Kaposi's sarcoma, Kupffer cell sarcoma, angiosarcoma, leukosarcoma, malignant mesenchymoma sarcoma, parosteal sarcoma, reticulocytic sarcoma, Rous sarcoma, serocystic sarcoma, synovial sarcoma, and telangiectaltic sarcoma.

[0080] The term “melanoma” is taken to mean a tumor arising from the melanocytic system of the skin and other organs. Melanomas which can be treated with a combination of antineoplastic thiol-binding mitochondrial oxidant and an anticancer agent include, for example, acral-lentiginous melanoma, amelanotic melanoma, benign juvenile melanoma, Cloudman's melanoma, S91 melanoma, Harding-Passey melanoma, juvenile melanoma, lentigo maligna melanoma, malignant melanoma, nodular melanoma, subungal melanoma, and superficial spreading melanoma.

[0081] The term “carcinoma” refers to a malignant new growth made up of epithelial cells tending to infiltrate the surrounding tissues and give rise to metastases. Exemplary carcinomas which can be treated with a combination of antineoplastic thiol-binding mitochondrial oxidant and an anticancer agent include, for example, acinar carcinoma, acinous carcinoma, adenocystic carcinoma, adenoid cystic carcinoma, carcinoma adenomatosum, carcinoma of adrenal cortex, alveolar carcinoma, alveolar cell carcinoma, basal cell carcinoma, carcinoma basocellulare, basaloid carcinoma, basosquamous cell carcinoma, bronchioalveolar carcinoma, bronchiolar carcinoma, bronchogenic carcinoma, cerebriform carcinoma, cholangiocellular carcinoma, chorionic carcinoma, colloid carcinoma, comedo carcinoma, corpus carcinoma, cribriform carcinoma, carcinoma en cuirasse, carcinoma cutaneum, cylindrical carcinoma, cylindrical cell carcinoma, duct carcinoma, carcinoma durum, embryonal carcinoma, encephaloid carcinoma, epiermoid carcinoma, carcinoma epitheliale adenoides, exophytic carcinoma, carcinoma ex ulcere, carcinoma fibrosum, gelatiniforni carcinoma, gelatinous carcinoma, giant cell carcinoma, carcinoma gigantocellulare, glandular carcinoma, granulosa cell carcinoma, hair-matrix carcinoma, hematoid carcinoma, hepatocellular carcinoma, Hurthle cell carcinoma, hyaline carcinoma, hypemephroid carcinoma, infantile embryonal carcinoma, carcinoma in situ, intraepidermal carcinoma, intraepithelial carcinoma, Krompecher's carcinoma, Kulchitzky-cell carcinoma, large-cell carcinoma, lenticular carcinoma, carcinoma lenticulare, lipomatous carcinoma, lymphoepithelial carcinoma, carcinoma medullare, medullary carcinoma, melanotic carcinoma, carcinoma molle, mucinous carcinoma, carcinoma muciparum, carcinoma mucocellulare, mucoepidermoid carcinoma, carcinoma mucosum, mucous carcinoma, carcinoma myxomatodes, nasopharyngeal carcinoma, oat cell carcinoma, carcinoma ossificans, osteoid carcinoma, papillary carcinoma, periportal carcinoma, preinvasive carcinoma, prickle cell carcinoma, pultaceous carcinoma, renal cell carcinoma of kidney, reserve cell carcinoma, carcinoma sarcomatodes, schneiderian carcinoma, scirrhous carcinoma, carcinoma scroti, signet-ring cell carcinoma, carcinoma simplex, small-cell carcinoma, solanoid carcinoma, spheroidal cell carcinoma, spindle cell carcinoma, carcinoma spongiosum, squamous carcinoma, squamous cell carcinoma, string carcinoma, carcinoma telangiectaticum, carcinoma telangiectodes, transitional cell carcinoma, carcinoma tuberosum, tuberous carcinoma, verrucous carcinoma, and carcinoma villosum.

[0082] By “therapeutically effective dose or amount” herein is meant a dose that produces effects for which it is administered. The exact dose and formulation will depend on the purpose of the treatment, and will be ascertainable by one skilled in the art using known techniques (see, e.g., Lieberman, Pharmaceutical Dosage Forms (vols. 1-3, 1992); Lloyd, The Art, Science and Technology of Pharmaceutical Compounding (1999); Remington: The Science and Practice of Pharmacy, 20th Edition, Gennaro, Editor (2003), and Pickar, Dosage Calculations (1999)).

[0083] The term “pharmaceutically acceptable salts” or “pharmaceutically acceptable carrier” is meant to include salts of the active compounds which are prepared with relatively nontoxic acids or bases, depending on the particular substituents found on the compounds described herein. When compounds of the present invention contain relatively acidic functionalities, base addition salts can be obtained by contacting the neutral form of such compounds with a sufficient amount of the desired base, either neat or in a suitable inert solvent. Examples of pharmaceutically acceptable base addition salts include sodium, potassium, calcium, ammonium, organic amino, or magnesium salt, or a similar salt. When compounds of the present invention contain relatively basic functionalities, acid addition salts can be obtained by contacting the neutral form of such compounds with a sufficient amount of the desired acid, either neat or in a suitable inert solvent. Examples of pharmaceutically acceptable acid addition salts include those derived from inorganic acids like hydrochloric, hydrobromic, nitric, carbonic, monohydrogencarbonic, phosphoric, monohydrogenphosphoric, dihydrogenphosphoric, sulfuric, monohydrogensulfuric, hydriodic, or phosphorous acids and the like, as well as the salts derived from relatively nontoxic organic acids like acetic, propionic, isobutyric, maleic, malonic, benzoic, succinic, suberic, fumaric, lactic, mandelic, phthalic, benzenesulfonic, p-tolylsulfonic, citric, tartaric, methanesulfonic, and the like. Also included are salts of amino acids such as arginate and the like, and salts of organic acids like glucuronic or galactunoric acids and the like (see, e.g., Berge et al., Journal of Pharmaceutical Science 66:1-19 (1977)). Certain specific compounds of the present invention contain both basic and acidic functionalities that allow the compounds to be converted into either base or acid addition salts. Other pharmaceutically acceptable carriers known to those of skill in the art are suitable for the present invention.

### DETAILED EMBODIMENTS

### I. Adsembly Methods

[0084] In one aspect, a method is provided for making a recombinant adenovirus (also referred to herein as “Adsembly”). The method includes assembling a nucleic acid from two or more adenoviral gene modules selected from an E1 module, an E2-L2 module, an L3-L4 module, an E3 module, an E4 module, or an adenoviral macromodule (or mutant thereof as described below). In some embodiments, the method includes assembling the nucleic acid from three, four or five adenoviral gene modules selected from an E1 module, an E2-L2 module, an L3-L4 module, an E3 module, an E4 module or an adenoviral macromodule. The nucleic acid may be an adenovirus genome construct. An adenovirus genome construct is a nucleic acid that, when expressed (e.g. upon introduction into a mammalian cell) is capable of forming a recombinant adenovirus. The nucleic acid may also be a partial adenovirus genome construct which, together with an additional virus (e.g. a helper virus) is capable of forming a recombinant adenovirus when expressed (e.g. upon introduction into a mammalian cell). The adenoviruses so formed may be replicated and packaged to give rise to progeny viruses. Thus, the methods provided herein may include assembling an adenoviral genome in vitro from two or more genomic modules or heterologous elements that upon transfection into mammalian cells, either alone, in a complementing cell-line, or together with a helper virus, is replicated and packaged to give rise to progeny viruses. Genomic modules may be selected based on evolutionarily conserved sequences, transcriptional or functional units. In some embodiments, the method includes assembling the nucleic acid from three or more adenoviral gene modules selected from an E1 module, an E2-L2 module, an L3-L4 module, an E3 module, and an E4 module. The resulting nucleic acid (also referred to herein as an “assembled nucleic acid”) may be expressed after assembly (e.g. replicated, transcribed, translated, and packaged) thereby forming a recombinant adenovirus. The expression of the nucleic acid may be performed in vitro, in situ, in a cell (e.g. by transfecting the nucleic acid into a cell), or in vivo. In certain embodiments, the expression is performed in a cell thereby leading to virus production.

[0085] The term “adenoviral gene module,” as used herein, refers to an E1 module, an E2-L2 module, an L3-L4 module, an E3 module, an E4 module or a macromodule thereof. An adenoviral gene module is, therefore, a nucleic acid (e.g. DNA). A “individual adenoviral gene module,” as used herein, refers to an E1 module, an E2-L2 module, an L3-L4 module, an E3 module, or an E4 module. In some embodiments, one or more of the individual adenoviral gene modules may be assembled from smaller submodules prior to assembling the nucleic acid. An adenoviral macromodule is the combination of two, three or four of an E1 module, an E2-L2 module, an L3-L4 module, an E3 module, an E4 module. The macromodule, therefore, is a linear strand of nucleic acid (e.g. DNA) that includes two, three or four of an E1 module, an E2-L2 module, an L3-L4 module, an E3 module, an E4 module. The term “adenoviral macromodule,” as used herein, refers to:
[0086] an E1-L2 macromodule (i.e. a nucleic acid including an E1 module and an E2-L2 module combined);
[0087] an E1-L4 macromodule (i.e. a nucleic acid including an E1 module, an E2-L2 module and an L3-L4 module combined);
[0088] an E1-E3 macromodule (i.e. a nucleic acid including an E1 module, an E2-L2 module, an L3-L4 module and an E3 module combined);
[0089] an E2-L4 macromodule (i.e. a nucleic acid including an E2-L2 module and an L3-L4 module, also referred to herein as a “core macromodule”);
[0090] an E2-E3 macromodule (i.e. a nucleic acid including an E2-L2 module, an L3-L4 module and an E3 module combined);
[0091] an E2-E4 macromodule (i.e. a nucleic acid including an E2-L2 module, an L3-L4 module, an E3 module and an E4 module combined);
[0092] an L3-E3 macromodule (i.e. a nucleic acid including an L3-L4 module, and an E3 module combined)
[0093] an L3-E4 macromodule (i.e. a nucleic acid including an L3-L4 module, an E3 module and an E4 module combined); and
[0094] an E3-E4 macromodule (i.e. a nucleic acid including an E3 module and an E4 module combined).
   In some embodiments, the adenoviral macromodule is an E2-L4 macromodule (i.e. a core macromodule) or an E3-E4 macromodule. Where an adenoviral macromodule is used as one of the two or more selected adenoviral modules for assembling the nucleic acid, the other selected adenoviral module(s) is/are not an individual adenoviral gene module contained within that adenoviral macromodule. In other words, each individual adenoviral gene module is present only once in the assembled nucleic acid, whether separately or within a macromodule. For example, where one of the two ore more selected adenoviral gene modules for assembling the nucleic acid is the core macromodule, neither the E2-L2 nor L3-L4 modules are selected as another module for inclusion in the assembled nucleic acid. Likewise, where three or more adenoviral gene modules are selected, the adenoviral macromodule is not an E1-E3 macromodule or E2-E4 macromodule.

[0095] In some embodiments, the method includes assembling the nucleic acid from three adenoviral gene modules selected from (i) an E1 module, (ii) a core macromodule, and (iii) an E3 module, an E4 module or an E3-E4 macromodule. The method may also include assembling the nucleic acid from four adenoviral gene modules selected from an E1 module, a core macromodule, an E3 module, and an E4 module.

[0096] In some embodiments, one or more adenoviral gene modules may be combined to form a macromodule prior to assembling the nucleic acid. Where a macromodule is formed, the method includes assembling the nucleic acid from a macromodule and one or more individual adenoviral gene modules not included within the macromodule (i.e. an E1 module, an E2-L2 module, an L3-L4 module, an E3 module, and/or an E4 module). In some embodiments, the macromodule is a core macromodule. Thus, in some embodiments, the method includes assembling the nucleic acid using the core macromodule and one or more adenoviral gene modules selected from the E1 module, the E3 module, or the E4 module.

[0097] Adenoviruses are non-enveloped, icosahedral viruses that replicate in the nucleus. The adenoviral gene modules provided herein refer to certain positions in adenoviral genomes, as described, for example, in Davison et al., Journal of General Virology, (2003), 84, 28695-2938. In some embodiments, the adenoviral gene modules are derived from a human adenovirus. FIG. 5 is a simplified map of human Ad5 showing the adenoviral gene modules provided herein as well as their approximate size in kilobases (kb). Each module may encode multiple gene products and alternative gene splicing arrangements.

[0098] An “E1 module,” as used herein, is a nucleic acid containing an adenoviral inverted terminal repeat (ITR). The E1 module may additionally include a promoter that may be operably linked to a protein coding region of the assembled nucleic acid. The E1 module is typically derived from the adenoviral E1A and/or E1B regions. In addition to the ITR region, the E1 module may also include any of the viral genes found from the E1 terminus of an adenoviral genome to the viral polymerase coding region (discussed below). For example, the E1 module may additionally include coding regions for the major transcriptional activator E1A (e.g. encoding inactivators of the pRB family), E1B-19K (e.g. encoding apoptosis blockers), E1B 55K (e.g. p53 binding, mre binding and viral mRNA exporters) and/or pIX (e.g. encoding minor structural proteins and proteins that interact with Hexon on the viral capsid). The E1 module may be approximately 4 kb, 3 kb, 2 kb or 1 kb in length. In some embodiments, the E1 module is approximately the same size in length as the E1A and E1B regions of an adenovirus found in nature (e.g. see FIG. 5).

[0099] An “E2-L2” module, as used herein, is a nucleic acid containing at least one of a viral DNA polymerase coding region and a hexon protein coding region. In some embodiments, the E2-L2 module also include a viral DNA-binding protein coding region. The E2-L2 module is typically derived form the adenoviral E2B, L1 and/or L2 regions. The E2-L2 module may additionally include coding regions for E2B IVa2 (e.g. encoding late transcription activators and proteins that assist in packaging viral DNA into the viral capsid), E2B Pol (e.g. encoding viral DNA polymerases), E2B pTP (e.g. encoding the terminal protein that attach to the ends of viral genomes and is necessary for viral replication and packaging), L1 52K (e.g. encoding proteins necessary for packaging viral DNA into capsids), L1 IIIa (e.g. encoding minor structural proteins that help to stabilizes the capsid), L2 III (penton) (e.g. encoding major structural proteins that form the vertex of the capsid where the fiber protrudes), L2 pVII (e.g. encoding core structural proteins with homology to histone H3 and associate with viral DNA in the capsid), L2 V (e.g. encoding core structural proteins that forms the association between DNA and the viral capsid), and L2 pX (e.g. encoding core structural protein that bind to and condense the viral genome). In some embodiments, the E2-L2 module is approximately the same size in length as the E2B, L1 and L2 regions of an adenovirus found in nature (e.g. see FIG. 5).

[0100] An “L3-L4” module, as used herein, is a nucleic acid containing at least one of a viral DNA polymerase coding region and a hexon protein coding region. In some embodiments, the L3-L4 module may also include a viral DNA-binding protein coding region. In some embodiments, where the E2-L2 module contains a viral DNA polymerase coding region, the L3-L4 does not contain a viral DNA coding regions and vice versa. Likewise, where the E2-L2 module contains a hexon protein coding region, the L3-L4 may not contain a hexon protein coding region and vice versa. Similarly, where he E2-L2 module contains a viral DNA-binding protein coding region, the L3-L4 may not contain a viral DNA-binding protein coding region and vice versa. In other words, the viral DNA polymerase coding region, the hexon protein coding region, and the viral DNA-binding protein coding region typically appear only once in the assembled nucleic acid. The L3-L4 module may also include coding regions for L3 pVI (e.g. encoding a minor structural proteins that form an association between the capsid and the viral genomic DNA at the vertices), L3 II (hexon) (e.g. encoding major structural proteins that form the triangular faces of the capsid), L3 23K (e.g. encoding viral proteases that processes viral proteins to complete capsid assembly), E2A DBP (e.g. encoding DNA binding proteins that binds viral DNA and facilitates replication), L4 100K (e.g. encoding proteins that inhibit cellular protein synthesis and promote translation of viral late proteins), L4 33K (e.g. encoding proteins that promote splicing of late viral genes), one or more fiber proteins, and L4 22K (e.g. encoding proteins that promotes late viral gene expression and aid in viral DNA packaging). In some embodiments, the L3-L4 module is approximately the same size in length as the L3, E2A and L4 regions of an adenovirus found in nature or the L3, E2A, L4 and L5 regions of an adenovirus found in nature (e.g. see FIG. 5).

[0101] A “core macromodule” (also referred to herein as an “E2-L4 macromodule”), as used herein, refers to a nucleic acid containing at least one of a viral DNA polymerase coding region and a hexon protein coding region. In some embodiments, the core macromodule may also include a viral DNA-binding protein coding region. In some embodiment, the core macromodule includes most of the viral structural proteins as well as those necessary for DNA replication and packaging. In some embodiments, it includes a viral DNA polymerase coding region, a hexon protein coding region and a viral DNA polymerase coding region. In other embodiments, the core may also include coding regions for L3 pVI (e.g. encoding a minor structural proteins that form an association between the capsid and the viral genomic DNA at the vertices), L3 II (hexon) (e.g. encoding major structural proteins that form the triangular faces of the capsid), L3 23K (e.g. encoding viral proteases that processes viral proteins to complete capsid assembly), E2A DBP (e.g. encoding DNA binding proteins that binds viral DNA and facilitates replication), L4 100K (e.g. encoding proteins that inhibit cellular protein synthesis and promote translation of viral late proteins), L4 33K (e.g. encoding proteins that promote splicing of late viral genes), and L4 22K (e.g. encoding proteins that promotes late viral gene expression and aid in viral DNA packaging), E2B IVa2 (e.g. encoding late transcription activators and proteins that assist in packaging viral DNA into the viral capsid), E2B Pol (e.g. encoding viral DNA polymerases), E2B pTP (e.g. encoding the terminal protein that attach to the ends of viral genomes and is necessary for viral replication and packaging), L1 52K (e.g. encoding proteins necessary for packaging viral DNA into capsids), L1 IIIa (e.g. encoding minor structural proteins that help to stabilizes the capsid), L2 III (penton) (e.g. encoding major structural proteins that form the vertex of the capsid where the fiber protrudes), L2 pVII (e.g. encoding core structural proteins with homology to histone H3 and associate with viral DNA in the capsid), L2 V (e.g. encoding core structural proteins that forms the association between DNA and the viral capsid), one or more fiber proteins, and L2 pX (e.g. encoding core structural protein that bind to and condense the viral genome). In some embodiments, the L3-L4 module is approximately the same size in length as the E2B, L1, L2, L3, E2A and L4 regions of an adenovirus found in nature or the E2B, L1, L2, L3, E2A, L4 and L5 regions of an adenovirus found in nature (e.g. see FIG. 5).

[0102] The protein encoded by the viral DNA polymerase gene contains sequence that shares at least 45% (e.g. 50%, 60%, 70%, 80%, 90%, 91%, 92%, 93%, 94%, 95%, 96%, 97%, 98%, 99% or 100%) identity to at least 50 contiguous amino acids (e.g. all) of amino acids 996-1103 of the human Ad5 DNA polymerase as set forth in SEQ ID NO:32 (FIG. 7A-C) or homolog thereof derived from another species. The protein encoded by the hexon gene contains sequence that shares at least 45% (e.g. 50%, 60%, 70%, 80%, 90%, 91%, 92%, 93%, 94%, 95%, 96%, 97%, 98%, 99% or 100%) identity to at least 50 contiguous amino acids (e.g. all) of amino acids 501-747 of the human Ad5 hexon as set forth in SEQ ID NO:73 (FIG. 7D-G) or homolog thereof derived from another species. The protein encoded by the viral DNA-binding protein gene contains sequence that shares at least 35% (e.g. 45%, 50%, 60%, 70%, 80%, 90%, 91%, 92%, 93%, 94%, 95%, 96%, 97%, 98%, 99% or 100%) identity to at least 50 contiguous amino acids (e.g. all) of amino acids 408-475 of the human Ad5 DNA-binding protein as set forth in SEQ ID NO:103 (FIG. 7H-I) or homolog thereof derived from another species.

[0103] An “E4 module,” as used herein, is a nucleic acid containing is a nucleic acid containing an adenoviral inverted terminal repeat (ITR). In some embodiments, the E4 additionally includes a coding region for one or more fiber proteins. The E4 module may additionally include coding regions for E4 orf 6/7 (e.g. encoding proteins that mediate E2F transactivation of viral transcription), E4 orf 6 (e.g. encoding proteins that promote viral DNA synthesis, stabilize and export viral late mRNAs, and promote splicing), E4 orf4 (e.g. encoding proteins that regulates viral transcription and splicing, and modulate PP2A), E4 orf3 (e.g. encoding proteins that block p53-mediated transcription, disrupt MRN DNA-repair complex, and prevent concatemerization), E4 orf2, and E4 orf1 (e.g. encoding proteins that promotes signaling through PI3-kinase thereby leading to protein synthesis and cell survival). In some embodiments, the E4 module is approximately the same size in length as the E4 region of an adenovirus found in nature or the E4 and L5 regions of an adenovirus found in nature (e.g. see FIG. 5).

[0104] An “E3 module,” as used herein, is a nucleic acid containing is a nucleic acid containing a coding region for one or more fiber proteins and/or an adenoviral inverted terminal repeat (ITR). In some embodiments, the E3 module includes of any known adenoviral sequence from the end of the protein coding region of pVIII to the ITR located at the right terminus of the genome (as shown in FIG. 5). The pVIII coding region is any gene that encodes a protein that contains sequence sharing at least 35% (e.g. 50%, 60%, 70%, 80%, 90%, 91%, 92%, 93%, 94%, 95%, 96%, 97%, 98%, 99% or 100%) identity to at least 50 contiguous amino acids (e.g. all) of amino acids 6-43 of the human Ad5 pVIII protein as set forth in SEQ ID:135 (FIG. 7J). The E3 module may additionally include coding regions for L4 pVIII (e.g. encoding a minor structural protein) E3 12.5K, E3 CR1α (e.g. encoding proteins that blocks apoptosis), E3 gp 19K (e.g. encoding immunomodulatory proteins that inhibit MHC-I antigen presentation), E3 ADP (e.g. encoding proteins that functions to efficiently lyse the cell for virus release), E3 RIDα (e.g. encoding immunomodulatory proteins that removes the pro-apoptotic FasL and TRAIL from cell surface), E3 RIDβ—(e.g. encoding immunomodulatory proteins that remove the pro-apoptotic FasL and TRAIL from cell surface), E3 14.7K (e.g. encoding proteins that block apoptosis), and L5 IV (Fiber) (e.g. encoding major structural protein that extend from the penton base and are responsible for receptor binding). In some embodiments, the E3 module is approximately the same size in length as the E3 region of an adenovirus found in nature or the E3 and L5 regions of an adenovirus found in nature (e.g. see FIG. 5).

[0105] An “E3-E4 macromodule,” as used herein, is a nucleic acid including an adenoviral inverted terminal repeat (ITR). The E-3-E4 macromodule may additionally include any known adenoviral sequence from the end of the protein coding region of pVIII to the ITR located at the right terminus of the genome (as shown in FIG. 5). The E3-E4 macromodule may additionally include coding regions for E4 orf 6/7 (e.g. encoding proteins that mediate E2F transactivation of viral transcription), E4 orf 6 (e.g. encoding proteins that promote viral DNA synthesis, stabilize and export viral late mRNAs, and promote splicing), E4 orf4 (e.g. encoding proteins that regulates viral transcription and splicing, and modulate PP2A), E4 orf3 (e.g. encoding proteins that block p53-mediated transcription, disrupt MRN DNA-repair complex, and prevent concatemerization), E4 orf2, E4 orf1 (e.g. encoding proteins that promotes signaling through PI3-kinase thereby leading to protein synthesis and cell survival), L4 pVIII (e.g. encoding a minor structural protein) E3 12.5K, E3 CR1α (e.g. encoding proteins that blocks apoptosis), E3 gp19K (e.g. encoding immunomodulatory proteins that inhibit MHC-I antigen presentation), E3 ADP (e.g. encoding proteins that functions to efficiently lyse the cell for virus release), E3 RIDα (e.g. encoding immunomodulatory proteins that removes the pro-apoptotic FasL and TRAIL from cell surface), E3 RIDβ—(e.g. encoding immunomodulatory proteins that remove the pro-apoptotic FasL and TRAIL from cell surface), E3 14.7K (e.g. encoding proteins that block apoptosis), and L5 IV (Fiber) (e.g. encoding major structural protein that extend from the penton base and are responsible for receptor binding).

[0106] In some embodiments, one or more of the adenoviral gene modules include one or more mutations (e.g. substitution, addition or deletion of a nucleic acid) relative to the sequence of the module found in the natural (e.g. wild type) adenovirus from which the adenoviral gene module is derived. For example, the nucleic acid provided herein may encode a sufficient number of adenoviral gene modules such that, under certain cellular conditions, transfection of the nucleic acid into a cell results in the formation of a replication competent adenovirus. The mutation in one or more of the adenoviral gene modules may allow the resulting adenovirus to replicate in some cells (e.g. diseased cells such as cancer cells) but not replicate in other cells (e.g. non-diseased cells such as healthy cells). The mutation may also include the addition of one or more protein coding regions (e.g. the addition of one or more exogenous or heterologous protein coding region such as a non-viral protein coding region). The addition of one or more proteins may provide additional viral functionality, loss of a viral functionality (e.g. replication), provide for a method of virus detection (e.g. a fluorescent marker), provide for a method of virus purification (e.g. a His tagged capsid protein), or provide a virus capable of producing a protein of interest that is subsequently isolated and/or purified for further use. Thus, the mutation may add a viral function or subtract a viral function. The recombinant adenoviruses produced herein, therefore, include adenoviruses that have been modified by the introduction of an exogenous (e.g. heterologous) nucleic acid or the alteration of the native nucleic acid sequence. The alteration may be through a mutation in one or more of the adenoviral gene modules as described above, or by the exclusion of one or more of the adenoviral gene modules present in the native adenoviral genome.

[0107] Thus, in some embodiments, the nucleic acid includes a mutated adenoviral nucleic acid sequence. An adenoviral nucleic acid sequence is a sequence found in a natural or native adenovirus (e.g. wild type). The mutated adenoviral nucleic acid sequence may result from a mutation in one or more of the adenoviral gene modules as described above, or by the exclusion of one or more of the adenoviral gene modules present in the native adenoviral genome. In certain embodiments, the nucleic acid includes a deleted adenoviral nucleic acid sequence, an ectopic adenoviral nucleic acid sequence, or an exogenous (e.g. heterologous) nucleic acid sequence (e.g. encoding a non-adenoviral gene product). The mutated adenoviral nucleic acid sequence may include a mutated E4-ORF3 gene product that confers altered functionality, a mutated E1B-55k gene product, a mutated adenoviral fiber gene product, a mutated viral coat protein, a pro-drug converting enzyme, a reporter protein, a mutated hexon protein, a protein fused to pIX, a protein toxic to certain cells, a complete or partial fiber gene from an adenovirus other than that type where the nucleic acid is obtained, and/or a targeting protein (e.g. a tumor-targeting protein or a vasculature-targeting protein).

[0108] In some embodiments, the nucleic acid includes the E1 module. The nucleic acid may also include both the E1 module and the E4 modules. In certain embodiments, the nucleic acid includes the E1 module and the E2-L2 module. The nucleic acid may also include the E1 module and the L3-L4 module. The nucleic acid may also include the E1 module, the E2-L2 module and the L3-L4 module.

[0109] In some embodiments, the method includes assembling the nucleic acid from at least three adenoviral gene modules selected from an E1 module, a core module, an E3 module, and/or derivations or components thereof. In related embodiments, for the example of human Ad5, the method includes assembling the nucleic acid from an E1 module, an E2-L2 module, an L3-L4 module, an E3 module, and an E4 module. In certain embodiments, the nucleic acid formed is at least 10, 11, 12, 13, 14, 15, 16, 17, 18, 19, 20, 21, 22, 23, 24, 25, 26, 27, 28, 29, 30, 31, 32, 33, 34, 35, 36, 37, 38, 39, 40, 41, 42, 43, 44, 45, 46, 47, 48, 49, or 50 kb in length. In some embodiments, the nucleic acid formed is at least 10, 11, 12, 13, 14, 15, 16, 17, 18, 19, 20, 21, 22 kb in length. In some embodiments, the nucleic acid formed is at least 10, 11, 12, 13, 14, 15 kb in length. In some embodiments, the nucleic acid formed is at least 10, 11, 12 kb in length. In some embodiments, the nucleic acid formed is at least 12 kb in length.

[0110] The nucleic acid formed by the methods provided herein may be any expressible nucleic acid. The nucleic acid may be expressed to produce an adenovirus. The adenovirus may be infectious and/or self replicable (e.g. replication competent). In some embodiments, the nucleic acid is a plasmid.

[0111] In some embodiments, the assembling includes combining the adenoviral gene modules (or macromodules) together to form the nucleic acid, wherein the orientation of the adenovirus modules or macromodules is conducive to form a replicable adenovirus upon introduction into a cell (e.g. expression or formation of the virus in the cell). Thus, in some embodiments, the adenoviral gene modules (e.g. macromodules) are assembled in an orientation specific manner. Any applicable cloning techniques may be employed, including, for example the so-called “gateway” technology and/or the sequence and ligation independent cloning technology (“SLIC”). The gateway technology or similar technology employs site specific recombination to exchange nucleic acid (e.g. DNA) fragments from one piece of nucleic acid to another. The net result is insertion of a nucleic acid sequence into a destination vector or plasmid. These technologies and methods are collectively referred to herein as “site specific recombination methods” or “SSR methods.” In one such application of an SSR method, DNA fragments are moved from an entry vector into a destination vector, the result of which is the allowed propagation of the destination vector (FIG. 9). Entry vectors and destination vectors typically contain recombination sites. In some embodiments, entry vectors are recombination competent. In other embodiments, entry vectors are hybridization competent. Hybridization competent entry vectors may contain one or more adenoviral gene modules, which can be released from the entry vector by enzymatic restriction, thereby releasing the adenoviral gene modules. Provided herein are SSR methods adapting the gateway technology for insertion of adenoviral gene modules into a destination vector to form the nucleic acid (e.g. a nucleic acid plasmid). General methods of using the gateway technology is described, for example, in Sone et. al., J Biotechnol. (2008) September 10; 136(3-4):113-21; Hartley, et al., Genome Res. (2000), 10, 1788-1795; and Sasaki, et al., J. Biotechnol. (2004), 107, 233-243.

[0112] For example, where an SSR method is used, the assembling includes contacting a recombination competent destination vector (e.g. a destination vector including a recombination site nucleic acid sequence) and one or more of the adenoviral gene modules with an integrase (e.g. lambda phage integrase, lambda phage excisionase, or the bacterial host integration factor) thereby forming an adenoviral gene module vector. The one or more of the adenoviral gene modules are recombination competent adenoviral gene modules (e.g. an adenoviral gene module including a recombination site nucleic acid sequence). In some embodiments, the one or more recombination competent adenoviral gene modules are formed by adding a recombination site nucleic acid sequence to an adenoviral gene module thereby forming the one or more recombination competent adenoviral gene modules. In other embodiments, the one or more recombination competent adenoviral gene modules are part of a recombination competent entry vector. In some embodiments, the recombination competent entry vectors containing one or more of the adenoviral gene modules are formed by contacting one or more recombination competent adenoviral gene modules and a recombination competent donor vector with an integrase, thereby forming the recombination competent entry vectors containing one or more of the adenoviral gene modules. Thus, in some embodiments, a recombination competent destination vector and one or more recombination competent entry vectors containing one or more of the adenoviral gene modules are contacted with an integrase activity, thereby forming an adenoviral gene module vector.

[0113] FIGS. 20-21 diagram an embodiment of the methods provided herein developed for human Ad5. The assembling includes combining a destination vector and one or more entry vectors, each containing an adenoviral gene module, with one or more of either lambda phage integrase, lambda phage excisionase, or the bacterial host integration factor, thereby forming an adenoviral gene module vector. In some embodiments, the entry vectors are formed by adding a recombination site to an adenoviral gene module, followed by combination with a donor vector and one or more of either lambda phage integrase, lambda phage excisionase, or the bacterial host integration factor thereby forming an adenoviral gene module entry vectors.

[0114] A destination vector is a nucleic acid to which the adenoviral gene module is to be joined, such as a plasmid. The joining may be by exchange of one or more entry vectors containing the adenoviral gene module to be included (e.g. inserted) within the destination vector. The destination vector may have one or more adenoviral gene modules present prior to contacting (e.g. combining) the recombination competent destination vector and the one or more of the adenoviral gene modules with the integrase (e.g. integrase, excisionase, and/or host integration factor).

[0115] A recombination site nucleic acid sequence, also referred to herein as “att” site, is a nucleic acid sequence that facilitates in vitro site specific recombination between two nucleic acids. In some embodiments, the recombination site nucleic acid sequence is approximately 21 bp in length. For example, a recombination site nucleic acid sequence may be a gateway recombinatorial signal, such as those shown in FIG. 10 and/or set forth in Sone et. al., J. Biotechnol. (2008) September 10; 136(3-4):113-21; Hartley, et al., Genome Res. (2000), 10, 1788-1795; and Sasaki, et al., J. Biotechnol. (2004), 107, 233-243. (e.g. attB sites, attL sites, attR sites, attP sites, attBr sites, attPr sites and the like).

[0116] In some embodiments, the one or more recombination competent adenoviral gene modules form part of (or are present within) a donor vector. The donor vector may be a plasmid compatible with gateway technology or similar type cloning technology.

[0117] In some embodiments, the DEST vectors contain different counterselection cassettes. A counterselection cassette is any DNA fragment that in certain conditions prevents growth of bacterial cells. FIG. 22 describes the efficiencies of various counterselection cassettes that have been used in the methods provided herein.

[0118] FIG. 19 details an original proposal for the reassembly of Ad5 adenovirus gene modules using multisite gateway strategies. This particular strategy involves combining four entry vectors, three of which were adenoviral gene modules and a fourth unrelated stuffer module. Once these four modules were combined, the stuffer module is removed by a gateway reaction to create a new destination vector. Lastly, the remaining two adenoviral gene modules are inserted by gateway reaction to complete the viral genome. This original proposal was inefficient when using the larger adenoviral gene modules in gateway reactions, along with the problem of toxicity from the Ad5 E1 module. Combination methods (e.g. SLIC and an SSR method) provided for easier assembly of genomes from the modules (e.g. less steps to perform and greater efficiency for each step).

[0119] The SLIC technology employs annealing of a single stranded homologous sequence by relying on exonuclease-generated single stranded nucleic acid (e.g. DNA) overhangs in two nucleic acid (e.g. DNA fragments) (FIG. 16). Thus, the SLIC technology employs homologous recombination and single stranded annealing (e.g. hybridization) by relying on exonuclease-generated single stranded nucleic acid (e.g. DNA) overhangs in the inserted nucleic acid (e.g. DNA) and destination vector. Provided herein are methods adapting the SLIC technology for insertion of adenoviral gene modules into a destination vector to form the nucleic acid (e.g. a nucleic acid plasmid). This process may also be referred to herein as AdSlic or AdSlicR. General methods of using SLIC technology is described, for example, in Li et al., Nature Methods (2007), 4, 251-256. FIG. 25 diagrams an example of AdSlicR as established for human Ad5. FIG. 26 details the efficiencies of the reactions in the AdSlicR method.

[0120] For example, where the SLIC technology (or similar cloning technology) is used, the assembling includes hybridizing (e.g. annealing) a hybridization competent destination vector (e.g. a destination vector (e.g. linear vector)) having a single stranded nucleic acid (e.g. DNA) overhang (e.g. on each terminus)) to one or more of the adenoviral gene modules thereby forming an adenoviral gene module vector. The hybridization competent destination vector may also be referred to herein as a SLIC competent vector. The one or more of the adenoviral gene modules may be a hybridization competent adenoviral gene module (e.g. an adenoviral gene module (e.g. a linear adenoviral gene module)) having at least one single stranded nucleic acid (e.g. DNA) overhang (e.g. on each terminus) sufficiently complementary to the single stranded nucleic acid (e.g. DNA) overhang of the destination vector to facilitate hybridization (e.g. under stringent conditions)). In some embodiments, the destination vector overhang and the adenoviral gene module overhang are each about 20 to 25 bp in length. The hybridization competent destination vector may be formed using any appropriate methodology.

[0121] For example, in some embodiments, where the destination vector is circular (e.g. a plasmid), the destination vector is cleaved (e.g. with an endonuclease) thereby forming a linear destination vector. The linear destination vector may then be contacted with an exonuclease (i.e. an enzyme with exonuclease activity such as a T4 DNA polymerase) thereby forming the hybridization competent destination vector. Similarly, the hybridization competent adenoviral gene module may be formed by contacting (e.g. treating) the adenoviral gene module with an exonuclease thereby forming a hybridization competent adenoviral gene module. In some embodiments, hybridizing a hybridization competent destination vector to one or more of the adenoviral gene modules may include combining the hybridization competent destination vector and the adenoviral gene module(s) with a DNA polymerase. In some embodiments, where the adenoviral gene module is circular or contained within a circular plasmid, the adenoviral gene module is linearized by endonuclease treatment prior to exonuclease treatment. Thus, in some embodiments, one or more of the hybridization competent adenoviral gene modules are formed by contacting an entry vector that includes one ore more entry vector adenoviral gene modules with an endonuclease, thereby forming one or more released entry vector adenoviral gene modules. The one or more released entry vector adenoviral gene modules may be contacted with an exonuclease, thereby forming one or more hybridization competent adenoviral gene modules. An entry vector adenoviral gene module as referred to herein is an adenoviral gene module that is part of an entry vector. A released entry vector adenoviral gene module as referred to herein is an adenoviral gene module that has been released from an entry vector by for instance a restriction enzyme. In some embodiments, the adenoviral gene module is not circular (e.g. obtained by PCR or gene synthesis) and does not require linearization prior to exonuclease treatment. In some embodiments, annealing a SLIC competent vector to one or more of the adenoviral gene modules may include combining the SLIC competent vector and the adenoviral gene module(s) with a DNA polymerase.

[0122] In some embodiments, the SLIC competent vector contains one or more adenoviral gene modules prior to annealing with SLIC competent adenoviral gene modules. Thus, in some embodiments, multiple SLIC reactions are performed sequentially to insert multiple adenoviral gene modules.

[0123] In some embodiments, in order to obtain adenoviral genomes in plasmids to be used as template to generate adenoviral gene modules, SLIC may be used to insert whole adenoviral genomes into a plasmid backbone. In some embodiments, the SLIC competent adenoviral genomes are obtained from purified virus stocks. FIG. 30 diagrams an embodiment of such a process and provides an example for human Ad5.

[0124] The adenoviral gene module vector is a nucleic acid having at least one adenoviral gene module. Using the appropriate cloning technology, the desired number of adenoviral gene modules are added to the destination vector to form the adenoviral gene module vector. For example, once formed, the adenoviral gene module (e.g. the adenoviral gene module vector) may be further modified using the appropriate cloning technology (e.g. gateway cloning technology and/or SLIC cloning technology) to add further adenoviral gene modules thereby forming the nucleic acid, which can be expressed (e.g. in cells) to form an adenovirus (e.g. a replicable adenovirus). Thus, in some embodiments, a first adenoviral gene module may be further modified using the appropriate cloning techniques to form second, third and/or forth adenoviral modules in which second third and/or fourth adenoviral gene modules, respectively, are added to the vector thereby forming the nucleic acid, which can be expressed to form an adenovirus (e.g. a replicable adenovirus). Thus, in some embodiments, the nucleic acid is an adenoviral gene module vector.

[0125] Indeed, different cloning technologies may be used to assemble the nucleic acid or adenoviral gene module vector. In some embodiments, the assembling includes hybridizing (e.g. annealing) a hybridization competent destination vector to a first adenoviral gene module thereby forming a first adenoviral gene module vector. The first adenoviral gene module may be a hybridization competent adenoviral gene module. The first adenoviral gene module vector and a second adenoviral gene module entry vector may be contacted (e.g. combined) with an integrase (e.g. an integrase, excisionase, or integration host factor) thereby forming a second adenoviral gene module vector. The second adenoviral gene module vector may be a recombination competent second adenoviral gene module vector (e.g. destination vector), and the second adenoviral gene module may be a recombination competent second adenoviral gene module. In some embodiments, the first adenoviral gene module is the E2-L2 module, the L3-L4 module, or the E2-L4 macromodule. The second adenoviral gene module may be the E1 module, the E3 module, or the E4 module. An example of combining cloning methods to assemble the adenoviral gene modules is provided in FIGS. 20-21 which combines SLIC with gateway.

[0126] In other embodiments, the assembling includes contacting (e.g. combining) a recombination competent destination vector and a first adenoviral gene module with (e.g. in the presence of) an integrase (e.g. an integrase, excisionase, or integration host factor) thereby forming a first adenoviral gene module vector. The first adenoviral gene module is a recombination competent first adenoviral gene module (e.g. entry vector). The first adenoviral gene module vector is hybridized to a second adenoviral gene module thereby forming a second adenoviral gene module vector. The first adenoviral gene module vector is a hybridization competent adenoviral gene module vector (e.g. a destination vector). The second adenoviral gene module is a hybridization competent adenoviral gene module (e.g. an entry vector). In some embodiments, the second adenoviral gene module is the E2-L2 module, the L3-L4 module, or the E2-L4 macromodule. The first adenoviral gene module may be the E1 module, the E3 module, or the E4 module.

[0127] In some embodiments (e.g. the example of human Ad5), the E2-L2 module and the L3-L4 module are approximately 14 kb and 10 kb, respectively. One of the discoveries provided herein is that the size of the E2-L2 and L3-L4 modules are, in some embodiments, too large to efficiently assemble into the nucleic acid using standard or gateway (e.g. multisite gateway) cloning technologies. An example is provided in FIG. 15. Thus, in some embodiments, SLIC cloning technology (or similar cloning technology) is used to insert these modules into a destination vector (e.g. an entry vector). The other adenoviral gene modules may be added using, for example, gateway cloning technologies. Thus, in some embodiments, where the E2-L2 module and the L3-L4 module assembled into the nucleic acid, it is preferable to assemble the nucleic acid using a combined SLIC and gateway (e.g. multisite gateway) cloning strategy. A particular embodiment of the combined SLIC and gateway (e.g. multisite gateway) cloning strategy is set forth in FIGS. 20-21.

[0128] Certain embodiments of the methods provided herein provide fast and efficient adenovirus genome construct assembly. In some instances, the adenovirus genome construct is assembled in less than 10, 9, 8, 7, 6, 5, 4, 3, 2, or 1 hour(s). The methods provided herein further enable the insertion of adenovirus fragments into vectors, facile and independent mutagenesis within individual vectors, and/or multisite specific in vitro assembly.

[0129] In some embodiments, one or all of the adenoviral gene modules may be selected from a library of recombinant adenoviral gene modules, as set forth below. Thus, certain embodiments of the Adsembly process enables quick and efficient construction of a wide variety of recombinant adenoviruses there by allowing fast optimization of customized adenoviral functionality based on optimal combinations of adenoviral gene modules. The methods thereby provide the ability to create novel Adenoviral serotype chimeras by mixing and matching parts from various Adenovirus serotypes. This allows for not only combinations imparting the unique properties of each serotype, but the utilization of various tropisms of the serotypes, and their use to potentially avoid pre-existing immunity to prevalent serotypes.

[0130] Certain embodiments of the methods provided herein avoid reliance on the limited restriction enzyme site cloning technology. The methods may also enable avoidance of exclusive reliance on Adenovirus serotype 5. Indeed, in the example of human Ad5, where all five of the E1 module, the E2-L2 module, the L3-L4 module, the E3 module, and the E4 module are employed, mutant options are substantially increased over previously known methods. In certain embodiments, the methods provided herein enable the creation of compound changes in the genome simultaneously.

[0131] The methods may also enable avoidance of previously known genome assembly relying exclusively on inefficient homologous recombination in specialized bacterial strains or in mammalian cell culture (e.g. MAGIC), which can often take several months. Moreover, certain embodiments of the methods provided herein provide simple protocols with commonly available reagents without the use of specialized bacteria (e.g. ccdB-resistant).

[0132] Utilities of the methods and libraries provided herein include, for example:
[0133] (1) Mutagenesis of adenoviral genes for gene function analysis.
[0134] (2) Adenoviral mutants in which the loss of adenoviral gene functions renders them unable to replicate in normal cells but undergo selective lytic replication in tumor cells in which their functions are complemented.
[0135] (3) Targeted gene expression, either as a replication defective vector or replication competent virus.
[0136] (4) The methods may provide novel replication defective Adenoviruses for gene expression. The Adenoviruses assembled using the methods herein may be optimized for this purpose. In the case of human Ad5, the library of E1 modules may include for example several E1A or E1B-deleted modules and/or each contain a different mammalian promoter thereby allowing the user to choose the best promoter to express the gene of interest.
[0137] (5) Multigene expression utilizing the existing transcriptional architecture of the adenovirus genome.

[0138] In some embodiments where each of the E1 module, the E2-L2 module, the L3-L4 module, the E3 module, and the E4 module are employed, the mutations are not present only in the E4 module.

[0139] The E1 module, the E2-L2 module, the L3-L4 module, the E3 module, the E4 module and macromodules thereof may be derived from any appropriate adenovirus using any appropriate methods (e.g. PCR techniques or gene synthesis). For example, PCR from viral genomic DNA obtained from purified virus (FIG. 14) may be employed. FIG. 13 details PCR efficiencies obtained for the human Ad5 adenoviral gene modules. In some embodiments, the combination of the E1 module, the E2-L2 module, the L3-L4 module, the E3 module, and the E4 module constitute or macromodules thereof constitute a complete, or substantially complete adenoviral genome. Using the teachings provided herein, a person having ordinary skill in the art may determine the precise locations of the breaks between the modules. For example, a bioinformatics approach may be used to determine optimal insertion sites for recombination site nucleic acid sequences (e.g. a gateway recombinatorial signal or a gateway recombination site). Several Adenovirus serotypes may be aligned, and the genomic regions between adenoviral gene modules may be analyzed for conservation. In some embodiments, nucleotide conservation between serotypes are avoided, whereas degenerate regions are acceptable insertion sites. For example, certain appropriate positions of insertion sites for recombination site nucleic acid sequences in human Ad5 are denoted with arrows in FIG. 12, FIG. 35, FIG. 36, FIG. 37 and FIG. 38.

[0140] In some embodiments, the sequence between adenoviral gene modules may be short thereby necessitating duplication of sequences. An example is provided in FIG. 12, where, due to the short amount of sequence between the Ad5 fiber polyA and the E4 polyA, a duplication of 27 bp of Ad5 sequence was inserted along with the attB site insertion.

[0141] In some embodiments, the nucleic acid (e.g. adenoviral gene module vector) includes one or more recombination site nucleic acid sequences. FIGS. 35-39 disclose examples, which are by no means intended to be limiting, of how the nucleic acid sequence position of the recombination site nucleic acid sequence within a recombinant adenovirus effects the growth rate of the recombinant adenovirus. Thus, in some embodiments, a recombinant adenovirus including one or more recombination site nucleic acid sequences (e.g. att sites) may grow slower than a recombinant adenovirus lacking one or more recombination site nucleic acid sequences. In other embodiments, a recombinant adenovirus including one or more recombination site nucleic acid sequences (e.g. att sites) may grow at least as fast as a recombinant adenovirus lacking one or more recombination site nucleic acid sequences. In other embodiments, the nucleic acid (e.g. adenoviral gene module vector) includes a recombination site nucleic acid sequence between the E3 module and the E4 module. In some embodiments, the recombination site nucleic acid sequence between the E3 module and the E4 module is an attB3 recombination site nucleic acid sequence. In some embodiments, the nucleic acid (e.g. adenoviral gene module vector) includes a recombination site nucleic acid sequence following nucleotide 32904 as set forth in SEQ ID NO:137 or an equivalent nucleotide in a homolog thereof. In other embodiments, the nucleic acid (e.g. adenoviral gene module vector) includes a recombination site nucleic acid sequence between the E1 module and the E2-L2 module. In other embodiments, the nucleic acid (e.g. adenoviral gene module vector) includes a recombination site nucleic acid sequence following nucleotide 4035 as set forth in SEQ ID NO:137 or an equivalent nucleotide in a homolog thereof. In other embodiments, the nucleic acid (e.g. adenoviral gene module vector) includes a recombination site nucleic acid sequence following nucleotide 3608 as set forth in SEQ ID NO:137 or an equivalent nucleotide in a homolog thereof. In some embodiments, the nucleic acid (e.g. adenoviral gene module vector) includes a recombination site nucleic acid sequence between the L3-L4 module and the E3 module. In some embodiments, the recombination site nucleic acid sequence between the L3-L4 module and the E3 module is an attB5 recombination site nucleic acid sequence. In other embodiments, the nucleic acid (e.g. adenoviral gene module vector) includes a first recombination site nucleic acid sequence between the E1 module and the E2 module, a second recombination site nucleic acid sequence between the L3-L4 module and E3 module and a third recombination site nucleic acid sequence between the E3 module and the E4 module. In other embodiments, the first recombination site nucleic acid sequence is included in the nucleic acid following nucleotide 4035 as set forth in SEQ ID NO:137 or an equivalent nucleotide in a homolog thereof, and the third recombination site nucleic acid sequence is included in the nucleic acid following nucleotide 32904 as set forth in SEQ ID NO:137 or an equivalent nucleotide in a homolog thereof.

[0142] Listed below is one example of an implemented insertion strategy showing four insertions into the Ad5 genome (SEQ ID NO:137). The numbers denote the nucleotide position within the published Ad5 genome sequence where the insertion site is located for insertion of the recombination site nucleic acid sequence. In the examples below, the attB sequences (i.e. the recombination site nucleic acid sequences) are underlined, and the duplication in Ad5 sequence for the final insertion is in bold. A person of ordinary skill in the art would immediately recognize appropriate and/or equivalent insertion sites in similar contents or homologous virus sequences.

Between 4075 and 4076:
CAACTTTTCTATACAAAGTTGTA
Between 17959 and 17960:
CAACTTTTTAATACAAAGTTG
Between 27173 and 27174:
TCAACTTTGTATACAAAAGTTGTG
Between 32815 and 32816:
ACAACTTTGTATAATAAAGTTGCTGAATCGTTTGTGTTATGTTTCAACG
TG

[0143] The assembly strategy in FIG. 21 has been used 17 times to yield infectious human Ad5 virus. FIG. 24 details the efficiencies of the methods provided herein. On four separate occasions, wild-type Adsembled adenovirus has been transfected into cells and virus has been produced. Additionally, this protocol has generated 13 mutant adenoviruses, all of which produce infectious virus. FIG. 27 provides images of reassembled wild-type Ad5 from the transfection as a single plaque and also passaged onto 293 cells. The viruses produced from the strategy in FIGS. 20-21 and FIG. 25 have been tested for replication efficacy in 293 cells, as shown in FIG. 28.

[0144] In another aspect, an adenovirus made by a method disclosed herein is provided. In some embodiments, the adenovirus is replication competent. In another embodiment, the adenovirus is not replication competent.

### II. Adenoviral Gene Module and Macromodule Libraries

[0145] In another aspect, a library including a plurality of adenoviral gene modules (e.g. macromodules) are provided. In some embodiments, the library includes a plurality of different E1 modules. In other embodiments, the library includes a plurality of different E2-L2 modules. In other embodiments, the library includes a plurality of different L3-L4 modules. In other embodiments, the library includes a plurality of different E3 modules. In other embodiments, the library includes a plurality of different E4 modules. In other embodiments, the library includes a plurality of different core macromodules. In some embodiments, the adenoviral genome library is prepared according to a methods described above.

[0146] In other embodiments, the library includes a plurality of different E1 modules, a plurality of different E2-L2 modules, a plurality of different L3-L4 modules, a plurality of different E3 modules, a plurality of different E4 modules, and/or a plurality of difference core macromodules. In some embodiments, the library includes a plurality of different macromodules, wherein the macromodules include a plurality of different E1-L2 macromodules, a plurality of different E2-L4 macromodules (i.e. core macromodules) and/or a plurality of different E3-E4 macromodules.

[0147] In some embodiments, the plurality of different adenoviral gene modules and/or macromodules are different in that they are derived from different types of adenoviruses (e.g. different species or different serotype). For example, in some embodiments the plurality of different E1 modules, the plurality of different E2-L2 modules, the plurality of different L3-L4 modules, the plurality of different E3 modules, the plurality of different E4 modules, and/or the plurality of different macromodules (e.g. core macromodules) comprise adenoviral gene modules from a plurality of adenoviral types (e.g. more than one human adenoviral serotype).

[0148] In some embodiments, the plurality of different adenoviral gene modules and/or macromodules are different in that they encode different mutant modules or macromodules (e.g. a deleted adenoviral nucleic acid sequence, a substituted adenoviral nucleic acid sequence, an ectopic adenoviral nucleic acid sequence, or a nucleic acid sequence encoding a non-adenoviral gene product). For example, the library may include a plurality of different E1 modules, a plurality of different E2-L2 modules, a plurality of different L3-L4 modules, a plurality of different E3 modules, a plurality of different E4 modules, or a plurality of different of macromodules (e.g. core macromodules) including a deleted adenoviral nucleic acid sequence, a mutated adenoviral nucleic acid sequence, an ectopic adenoviral nucleic acid sequence, or a nucleic acid sequence encoding a non-adenoviral gene product.

[0149] In some embodiments, the plurality of different adenoviral gene modules and/or macromodules are recombination competent (e.g. contained within an entry vector). For example, the library may include a plurality of different E1 modules, a plurality of different E2-L2 modules, a plurality of different L3-L4 modules, a plurality of different E3 modules, a plurality of different E4 modules, and/or a plurality of different of E2-L4 macromodules modules that are recombination competent.

[0150] In some embodiments, the plurality of different adenoviral gene modules and/or macromodules are hybridization competent (e.g. SLIC competent such as after linearization). For example, in some embodiments, the library includes a plurality of different E1 modules, a plurality of different E2-L2 modules, a plurality of different L3-L4 modules, a plurality of different E3 modules, a plurality of different E4 modules, and/or a plurality of different of E2-L4 macromodules that are hybridization competent.

[0151] Portions of the libraries provided herein may be created by different users and shared between different users. The various adenoviral gene modules may be mixed and matched to build novel adenoviral constructs with desired functionality or lack of functionality. The methods and libraries herein, therefore, provide the ability to create novel Adenoviral serotype chimeras by mixing and matching parts from various Adenovirus serotypes. The library of adenoviral gene modules provides users multiple options for building their ideal adenoviral vector.

[0152] In some embodiments, an adenoviral gene module may be toxic to bacteria. For example, FIG. 18 demonstrates the toxicity of the human Ad5 E1 module. In some embodiments, an adenoviral gene module may need to be contained within plasmids that are maintained at lower copy number (e.g. p15A origin of replication).

[0153] In some embodiments, an adenoviral gene module toxicity, size, or other factor may prevent their use in SSR methods (e.g. gateway reactions). For example, FIG. 15 details standard gateway BP reaction efficiencies for the 5 human Ad5 adenoviral gene modules. In some embodiments, an adenoviral gene module that is inefficient using an SSR method (e.g. a gateway reaction) may be manipulated by alternative cloning methods (e.g. SLIC). FIG. 17 diagrams a strategy to use SLIC in place of an SSR method (e.g. using gateway cloning enzymes) to create entry vectors.

### III. Kits

[0154] In another aspect, a kit is provided for us in the methods and libraries provided herein that include a nucleic acid including two or more adenoviral gene modules selected from an E1 module, an E2-L2 module, an L3-L4 module, an E3 module, an E4 module, or an adenoviral macromodule (or mutant thereof as described below). Appropriate components of the kit include the compositions and components discussed above in Sections I and/or II.

[0155] For example, in some embodiments, the kit may include a nucleic acid including three, four or five adenoviral gene modules selected from an E1 module, an E2-L2 module, an L3-L4 module, an E3 module, an E4 module or an adenoviral macromodule. The nucleic acid may form part of a vector (e.g. a plasmid), as discussed above (e.g. a destination vector or donor vector).

[0156] In some aspects, the kits provided herein may include a vector with or without an adenoviral gene module. Vectors useful in the kits may include one or more recombination site nucleic acid sequences and/or a single stranded nucleic acid overhang (or a nucleic acid sequence capable of forming a single stranded nucleic acid overhang upon contact with an appropriate enzyme.) In some embodiments, the vector is a hybridization competent destination vector, a SLIC competent vector or a donor vector as described above. The vectors may include one or more adenoviral gene modules. In some embodiments, the vector includes include a counterselection cassettes.

[0157] Additional components of kits for practicing the methods provided herein would be readily apparent in view of the present description of the Adsembly methods and Libraries (e.g. exonucleases, integrases, promoter sequences etc.)

### IV. Examples

[0158] The following examples are offered to illustrate, but not limit the claimed invention.

[0159] A. Methods of Viral Assembly

[0160] 1. ‘Combining’ Chemistry and ‘Recombining’ Viral Genomes to Develop Next Generation Viral Vectors and Replicating Lytic Cancer Therapies

[0161] We developed the use recombination strategies for the rapid de novo assembly of viral genomes from component parts, allowing the systematic combination of multiple modifications and heterologous elements.

[0162] The potential of adenoviral vectors in several applications is hindered by the ability to engineer and combine multiple genetic modifications rapidly and systematically. The main methods being used for the most part depend on the availability of unique of suitable restriction enzyme sites at appropriate locations in the genome and are not generally amenable for systematic use or creating precise compound modifications in rapid single step The manipulation of large genomic DNA fragments and the paucity of unique restriction sites make this technically challenging and limited. Another method requires the generation of a smaller ‘shuttle’ vector with the genomic region to be modified, and a ‘backbone’ vector with the viral genome. The major rate limiting step for these vectors is recombination, which either occurs by homologous recombination in mammalian cells (a very low frequency event, occurring at random sites and requiring multiple rounds of plaque purifications to isolate the desired recombinant) or by homologous recombination in special bacterial strains. These methods are limited.

[0163] To overcome the limitations of current technologies, we have developed a novel adenovirus genome assembly strategy that enables the rapid and systematic generation of compound viral mutants overnight. This eliminates inefficient and imprecise recombination in mammalian cells, the need for available BACs or shuttle vectors, time-consuming and laborious plaque purifications. This strategy provides the ability to assemble in vitro novel viral genomes rapidly from component parts, including: 1) multiple mutations/modifications to viral genes, 2) genes from other viral subtypes e.g. viral coat proteins that bind different receptors and switch serotypes, 3) ectopic genes e.g. pro-drug converting enzymes to induce potent tumor by-stander effects, 4) the addition of fluorescent reporters or tags for in vivo imaging and diagnostics, and 5) directed in vitro viral evolution. In addition, this technology takes advantage of the natural viral transcriptional architecture, which for human Ad5 encodes 36 genes (not including splice variants), so that multi-protein complexes and entire pathways can be assembled, delivered and co-expressed via adenoviral infection.

[0164] To overcome the limitations of Ad2/5 and current methodologies, we have developed Adsembly methods that enable the rapid de novo assembly of adenoviral genomes in vitro from genomic component parts and heterologous elements. Using a bioinformatics approach, we split the different adenoviral genomes (36-38 kb) into 5 units, based on evolutionarily conserved sequences, transcriptional and functional modules. Each of these 5 units comprise compatible sections of a genomic building “parts library”, the functions and diversity of which is altered by engineering mutations or heterologous elements and further expanded by adding equivalent units from disparate adenovirus serotypes, mutants and species. In order to create a new adenovirus with unique properties, one of each of the units is selected from the library and rapidly reassembled into a complete genome in vitro using Adsembly (e.g. Ad-SlicR). Adsembly can be used to assemble a novel genome via multi-site specific recombination, which upon transfection, self-excises from a plasmid backbone and replicate to produce novel viruses. Ad-SlicR is a strategy that may be used to erase inserted recombination sequences for more potent viral replication (if necessary) and clinical use. The strategies disclosed herein may use a library genome building blocks, created from human and/or animal adenoviruses that have different tropisms to Ad2/5 and other desirable properties or which have been genetically modified to confer altered functionality.

[0165] To achieve this, we exploit a modified λ phage site specific recombination system with improved specificity and efficiency, also known as ‘Gateway.’ There are 4 classes of recombination sites called attB, attP, attL, and attR, which are recombined by distinct phage enzymes. Recently, novel att site specificities have been identified, that allow simultaneous recombination of multiple DNA fragments in a defined order and orientation. Disclosed herein is a novel application of this system to assemble de novo entire viral genomes from genomic component parts. Surprisingly, this technology revolutionizes the development and potential applications of adenoviral vectors.

[0166] Sets of primers incorporating unique pairs of attB sites (numbered 1-6) are used to amplify the viral genome in matched contiguous groups. The Ad5 adenoviral genome is 36 kb and is temporally divided into ‘early’ (E) and ‘late’ (L) transcriptions units, which together encode 36-40 genes.

[0167] Wild type Ad5/2, mutants of Ad5/2 and disparate adenoviral subtypes or animal viruses are used as DNA templates. PCR fragments are recombined into ‘Entry’ vectors to generate a library with the constituent elements of the adenoviral genome. LR recombination into a destination vector assemble multiple permutations of individual elements into novel viral genomes (FIG. 1B). This is facilitated by positive selection for the destination vector's antibiotic resistance and the negative selection of unreacted destination vectors in E. coli afforded by the toxic gene, ccdB (Hartley et al., 2000). In case the number or size of fragments limits recombination efficiency, intermediate destination vectors are created where modular replacement or complete assembly occurs in a second BP/LR reaction. This quick and novel method of viral DNA manipulation transforms the engineering of novel viruses by taking advantage of the innate chemistry of DNA recombination.

Additional combinations are integrated, for example, Adenovirus 34 Fiber which binds to the CD46 cellular receptor and evades neutralizing antibodies produced to Ad2/5 viruses.

[0168] 2. Materials and Methods

[0169] Using the above guidelines, modified adenoviruses were made with the below references components. Gateway DONR vectors were employed. In the example of human Ad5, the E1 module was obtained by PCR and inserted into the vector pDONR P1P4 using SLIC. The pDONR P1P4 vector backbone including attL1 and attL4 recombination sites was amplified using PCR and combined with the Ad5 E1 module by SLIC. In order to generate an alternate counterselection cassette, vector pDONR P1P4 was modified. This vector backbone including attP1 and attP4 recombination sites was amplified using PCR and combined with the PheS^{A294G} mutations and a Tetracycline resistance cassette (the pLac-Tet cassette from pENTR L3-pLac-Tet-L2) to create a new DONR vector. The attR1-PheS^{A294G}-Tet(r)-attR4 fragment from the new DONR vector was then amplified by PCR and inserted into the Adsembly DEST vector. See “MultiSite Gateway® Pro Plus”, Cat #12537-100; and Sone, T. et al. J. Biotechnol. 2008 Sep. 10; 136(3-4):113-21.

[0170] In the example of human Ad5, E3 module was inserted into the pDONR P5P3r vector by gateway BP reaction. The E4 module was inserted into pDONR P3P2 vector by gateway BP reaction. The attR5-ccdB-Cm(r)-attR2 fragment from the pDONR P5P2 vector was amplified by PCR and inserted into the Adsembly DEST vector. See “MultiSite Gateway® Pro Plus”, Cat #12537-100; and Sone, T. et al. J. Biotechnol. 2008 Sep. 10; 136(3-4):113-21.

[0171] The vector backbone for the Adsembly DEST vector is composed of parts from three different sources. The Amp(r) cassette and lacZ gene was amplified from plasmid pUC19. This was combined with the p15A origin of replication, obtained from plasmid pSB3K5-I52002, part of the BioBricksiGEM 2007 parts distribution. The p15A ori, which maintains plasmids at a lower (10-12) copy number is necessary to reduce E1 toxicity. Lastly, in order to create a self-excising virus, the mammalian expression cassette for the enzyme I-SceI was PCR'd from plasmid pAdZ5-CV5-E3+. This cassette was cloned into the vector backbone to create the vector called p15A-SceI. This is the vector used to start genome assembly. In the example of human Ad5, the gene modules were all obtained from either DNA purified from wild type Ad5 virus or the plasmid pAd/CMV/V5/DEST (Invitrogen).

[0172] Regarding the DEST vector in the example of human Ad5, the E2 and L3 modules were inserted into plasmid p15A-SceI by 3-fragment SLIC. The counterselection marker expressing ccdB and Chlor(r) flanked by attR5 and attR2 sites was obtained by PCR from plasmid pDONR P5P2. The second counterselection marker (PheS-Tet), was obtained by PCR from the vector pDONR P1P4 PheS^{A294G}-Tet (see above). The two counterselection markers were inserted on the right (ccdB/Cm) and left (PheS/Tet) sides of p15A-SceI E2-L4 by SLIC after cutting with unique restriction enzymes engineered to the ends of the E2 and L4 modules to create the DEST vector.

[0173] Regarding the multisite gateway entry vector containing adenoviral gene modules, in the example of human Ad5, the E1 module were inserted into pDONR P1P4 by SLIC. The E3 module was inserted into pDONR P5P3R by gateway BP reaction. The E4 module was inserted into pDONR P3P2 by gateway BP reaction.

[0174] Regarding Amp(r) cassette: plasmid pUC19, the p15A ori: plasmid pSB3K5-I52002 was part of the BioBricksiGEM 2007 parts distribution. Regarding the adenoviral adenoviral gene modules, either the DNA purified from Ad5 particles, or plasmid pAd/CMV/V5/DEST (Invitrogen). The DONR vectors pDONR P1P4, P5P2, P5P3R, P3P2 were received from Jon Chesnut (Invitrogen). The PheS gene was derived from DH5alpha bacterial genomic DNA and subsequently mutated by quick change to create the PheS^{A294G} mutant. Regarding the Tet(r) gene, the plasmid pENTR L3-pLac-Tet-L2 was received from Jon Chesnut (Invitrogen).

[0175] Regarding an embodiment of the Adsembly method, 20 fmol of a dual DEST vector, typically containing a core module flanked by two counterselection cassettes, is combined with 10 fmol of each remaining entry vector containing gene modules. In the example of Ad5, this includes combining 20 fmol of the E2-L3 dual DEST vector with 10 fmol each of an E1 module entry vector, an E3 module entry vector, and an E4 module entry vector. In some cases, increasing the amount of one or more of the entry vectors may increase efficiency (e.g. using 50 fmol of the E1 module entry vector for Ad5). These vectors are combined with 2 μl of LR Clonase II (Invitrogen) in a final volume of 10 μl. The reaction is incubated at 25° C. overnight (12-16 hours). The reaction is stopped by the addition of 1 μl of proteinase K (Invitrogen) and incubation at 37° C. for 10 minutes. Five μl of the reaction is then transformed into high competency bacteria (>1e9 cfu/μg) that are sensitive to the ccdB gene product and plated onto YEG-Cl agar plates (as described in Kast, P. Gene, 138 (1994) 109-114; when using PheS^{A294G} counterselection) or other appropriate media for the counterselection used in the vector. Colonies are subsequently isolated and screened for complete genomes.

[0176] Regarding PCRs, all PCRs were performed using the Phusion enzyme (NEB). PCRs to obtain the ADENOVIRAL GENE modules from Ad5 were performed with 1×HF buffer, 200 μM each dNTP, 0.504 each primer, and 10 ng of template. For the E2-L2 module, 3% DMSO was also added. Template was either plasmid pAd/PL-DEST (Invitrogen; for E2-L2, L3-L4, and E4 modules) or Ad5 genomic DNA (for E1 and E3 modules). PCR conditions were as follows. E2-L2 and L3-L4: 98° C. 30 sec-10 cycles of 98° C. 10 sec, 65° C. 30 sec (decrease temp 1° C. every 2 cycles), 72° C. 7 min-29 cycles of 98° C. 10 sec, 60° C. 30 sec, 72° C. 8 min-72° C. 10 min-4° C. hold. E3: 98° C. 30 sec-10 cycles of 98° C. 10 sec, 70° C. 30 sec (decrease temp 0.5° C. every cycle), 72° C. 2 min 30 sec-25 cycles of 98° C. 10 sec, 68° C. 30 sec, 72° C. 2 min 30 sec-72° C. 10 min-4° C. hold. E4: 98° C. 30 sec-6 cycles of 98° C. 10 sec, 63° C. 30 sec (decrease temp 0.5° C. every cycle), 72° C. 2 min-29 cycles of 98° C. 10 sec, 60° C. 30 sec, 72° C. 2 min-72° C. 5 min-4° C. hold.

[0177] Regarding obtaining viral genomic DNA from purified virus, up to 100 μl of purified virus is added to 300 μl of lysis buffer containing 10 mM Tris pH8, 5 mM EDTA, 200 mM NaCl, and 0.2% SDS. Mix is incubated at 60° C. for 5 min, followed by addition of 5 μl of proteinase K stock (˜20 mg/mL) and further incubated at 60° C. for 1 hour. Samples are then placed on ice for 5 min, followed by spinning at 15K×g for 15 min. Supernatant is removed and added to an equal volume of isopropanol, mixed well, and spun at 15K×g for 15 min at 4° C. Pellet is washed with 70% ethanol and respun for 15 min at 4° C. The pellet is dried and resuspended for use.

[0178] Regarding SLIC, linear fragments are exonuclease treated for 20 min at room temp in the following 20 μl reaction: 50 mM Tris pH8, 10 mM MgCl₂, 50 m/mL BSA, 200 mM Urea, 5 mM DTT, and 0.50 T4 DNA polymerase. The reaction is stopped by addition of 1 μl 0.5M EDTA, followed by incubation at 75° C. for 20 min. An equal amount of T4-treated DNAs are then mixed to around 20 μl in volume in a new tube. For SLIC combining 2 fragments, 10 μl of each reaction is used. For SLIC combining 3 fragments, 7 μl of each reaction is used. Fragments are annealed by heating to 65° C. for 10 min, followed by a slow cool down decreasing the temperature 0.5° C. every 5 seconds down to 25° C. After annealing, 5 μl of the reaction is transformed and clones are screened.

[0179] Regarding AdSlicR, for the example of Ad5, a 3-fragment SLIC reaction is performed using 100 ng of T4-treated p15A-SceI (linearized by PCR), and 300 ng of each of the E2 and L3 modules (obtained by PCR from their respective entry vectors). This creates vector p15A-SceI E2-L4. Five μg of p15A-SceI E2-L4 is cut with SwaI and gel purified using Qiagen QiaexII. The E3 and E4 modules are obtained by PCR from their respective entry vectors. Each of the linearized vector (450 ng) and PCR products (200 ng) are treated with T4 DNA polymerase and SLIC performed as normal, using 150-200 ng of vector and ˜100 ng of each module PCR. After isolation of positive clones, 5 μg of the new vector is cut with Pad and gel purified, then combined with an E1 PCR product (100 ng of T4-treated) in a new SLIC reaction. This completes the genome assembly, and the plasmid is ready for transfection to reconstitute virus.

[0180] B. Modified Adenoviruses

[0181] Adenoviruses are frequently used for gene transfer applications. For example, they are used to deliver transgenes to cells in culture, to animal tissue in vivo, or to human cells in vivo for gene therapy. One limiting factor in using adenoviruses in this way is gene expression is transient. Adenoviruses are non-integrating viruses, and thus the transgene expression is lost upon cell division. Other viral systems that are integrating, such as retroviruses and lentiviruses, are used for these same gene transfer purposes. However, these naturally integrating viruses are small, thus limiting the amount of transgene that can be expressed, are difficult to grow to high titers, are difficult to express multiple transgenes from, and integrate at random locations in the genome.

[0182] It has been demonstrated that the PhiC31 integrase can mediate integration of foreign circular DNA containing an ˜280 bp attB sequence into a host cell chromosome at specific locations known as pseudo-attP sites. This process has been demonstrated using circular plasmid DNA, but has not been demonstrated with a virus such as adenovirus, likely because the adenoviral genome is linear and thus would either not integrate or would integrate causing a chromosomal break. Here we provide a system whereby a recombinant adenovirus genome is created in such a way that upon transduction, a portion of the genome becomes circular through cre-mediated recombination of loxP sites, thus allowing for targeted integration via PhiC31 integrase/attB.

[0183] For this technology, the Adenoviral genome is modified in several ways (see FIGS. 31-33). First, the E1 and E3 regions are deleted to allow for multiple transgene expression. The E4 region is replaced with a cassette expressing the cre recombinase and the PhiC31 integrase. The expression of these enzymes is regulated using a tet-responsive promoter or other similar regulatable element. Two loxP sites are placed in the genome, one on the left end of the E 1 region where the transgene is expressed, and the second between the fiber and the E4 region. Thus, everything in between these two loxP sites will be inserted into the cellular chromosome. Lastly, the PhiC31 attB site is placed within the E3 region, although the particular placement of this short sequence can be at other locations as long as it is between the loxP sites. (Although in this example the cre recombinase and PhiC31 integrase are expressed from the same adenovirus that contains the loxP sites and transgenes, one could also express those enzymes from a separate virus.)

[0184] Upon transduction of the adenovirus into cells, the cre recombinase and PhiC31 integrase are induced. cre facilitates the recombination of the loxP sites in the adenovirus genome. This leads to the circularization of the DNA located between the loxP sites. This then allows for the integrase to recombine the circular fragment into the cellular chromosome using the attB site in the fragment (see FIG. 33). The end result is the stable (non-reversible) integration of a selected portion of the adenovirus genome into the host cell chromosome at one of a limited number of locations. The transgenes are stably expressed from this integration. There is no risk of adenovirus replication or reactivation since 1) the E1 region is deleted and 2) the ends of the viral genome are deleted in the process. Both of these regions are necessary for virus transcription and replication.

[0185] Advantages of this system over existing retrovirus and lentivirus systems include 1) integration at a limited number of locations within the genome rather than being random, 2) increased size allowance for transgene expression, 3) the ability to retarget the adenovirus to specific cells or tissues through fiber modifications (FIGS. 39-42) or the use of other adenovirus serotypes and species (FIG. 45), 4) ease of manipulation using the Adsembly system, 5) ease of production of high-titer virus, and 6) ease of multigene expression from a single vector.

[0186] This system advances on the current PhiC31 integration technology (sold by Life Technologies as the “Jump-In” line of products) by the use of viral-mediated DNA delivery. The existing technology is only plasmid-based, and thus is limited to cells that can be transfected or electroporated efficiently. Plus it cannot be used in vivo unless specific transgenic mice are created. Adenovirus is routinely used to deliver transgenes in vivo, and thus this greatly expands the capabilities of the existing technology. One incarnation would be the creation of mouse models using multi-gene expression cassettes via titratable and targeted delivery of a modified adenovirus to specific tissues. Another incarnation would be to mouse-line containing an att site for targeted knock-in. Another incarnation would be for iPS.

[0187] C. Creation of a Complete Near Wild-Type Adenovirus Type 5 Using Adsembly

[0188] Adsembly was used to construct a near wild-type version of Ad5 using the following strategy. A wild-type core sequence flanked by gateway counterselection cassettes was mixed with a wild-type Ad5 E1 module, a wild-type Ad5 E3 module, and a wild-type Ad5 E4 module (FIG. 21). A clone that contained a completely assembled genome was isolated and transfected into 293 cells. Plaques were visible after 7 days, and the virus was harvested and amplified on more 293 cells. Growth analysis revealed that this near wild-type virus (it contains 3 attB insertions compared to a true wild-type virus) grew to only slightly reduced titers as a true wild-type virus (FIG. 28).

[0189] D. Creation of a Mutant Ad5 that is Replication Defective, Expressed GFP, and Contains a Fiber Protein from an Alternate Serotype

[0190] We created a mutant Ad5 using Adsembly. The Ad5 E1 module was altered such that the E1A and E1B regions were deleted, thus rendering any virus made with this new vector replication defective. After removal of E1A and E1B, a mammalian expression cassette was inserted containing the CMV IE promoter and the GFP gene. The Ad5 E3 module was altered such that the Ad5 fiber gene was replaced with the fiber gene from Ad34. These mutant E1 and E3-fiber modules were combined with a wild-type Ad5 E4 module and a wild-type Ad5 core module flanked by gateway counterselection cassettes in a standard Adsembly reaction (FIG. 21). A resulting clone that was a complete assembled genome was isolated and transfected into 293 cells. Plaques were visible after 7 days, and the virus was harvested and amplified on more 293 cells. Growth of this virus indicates that this strategy can be used for 1) transgene expression, 2) fluorescent gene expression, 3) replication defective virus construction, 4) chimeric adenovirus creation, and 5) alternate fiber expression in an Ad5 background.

[0191] E. Creation of a Replication Competent Ad5 Using AdSlicR.

[0192] AdSlicR was used to construct a wild-type Ad5 from adenoviral gene modules. The wild-type E3 and E4 modules were obtained by PCR from their adenoviral gene module vectors. These were combined with a SwaI-cut wild-type Ad5 core module in a standard SLIC reaction (FIG. 25). A clone that successfully contained the core module with the E3 and E4 modules was isolated and cut with Pad. This was then combined in a second SLIC reaction with a wild-type Ad5 E1 module obtained by PCR from the adenoviral gene module vector. A clone containing a completely assembled genome was isolated and transfected into 293 cells. Plaques were visible by day 7. The resulting virus was amplified on more 293 cells. Growth analysis of this virus revealed that it grows to the same titers as wild-type Ad5 (FIG. 28).

### V. Tables

[0193] Tables 1-9 disclose examples of adenoviral gene module vectors, destination vectors and entry vectors prepared using the methods provided herein.

TABLE 1

| ID | method/technique | Expression | Mutations |
|---|---|---|---|
| PTFL-100 | Adsembly | | WT |
| PTFL-101 | Adsembly | | WT |
| PCMN-102 | AdSLIC | | WT |
| PCMN-103 | AdSLIC | | WT |
| PCMN-104 | AdSLIC | | WT |
| PCMN-105 | AdSLIC | | WT |
| PCMN-106 | AdSLIC | | WT |
| PCMN-107 | AdSLIC | | WT |
| PCMN-108 | AdSLIC | | WT |
| PCMN-109 | AdSLIC | | E1B55K-H260A |
| PCMN-110 | AdSLIC | | E4orf3-I104R |
| PCMN-111 | AdSLIC | | E1B55K-H260A; E4ORF3-I104R |
| PTFL-112 | Adsembly | IRES-GFP | ΔE1-CMV-IRES-GFP |
| PTFL-113 | Adsembly | IRES-GFP | ΔE1-CMV-IRES-GFP; Ad34 fiber |
| PCMN-117 | AdSLIC | CMV-GFP | ΔE1/ΔE4ORF3 |
| PCMN-118 | AdSLIC | | ΔE4ORF3 |
| PTFL-120 | Adsembly | CMV-GFP | ΔE1-CMV-GFP |
| PTFL-121 | Adsembly | CMV-GFP | ΔE1-CMV-GFP; Ad34 fiber |
| PTFL-123 | Adsembly | CMV-GFP | ΔE1-CMV-GFP; Ad5/3 fiber tail/KS |
| PCMN-124 | AdSLIC | | ΔE1B-55K |
| PCMN-125 | AdSLIC | CMV-ORF3 | ΔE1/ΔE4ORF3 |
| PCMN-126 | AdSLIC | CMV-ORF3 N82A | ΔE1/ΔE4ORF3 |
| PCMN-127 | AdSLIC | CMV-ORF3 EK4 | ΔE1/ΔE4ORF3 |
| PCMN-128 | AdSLIC | CMV-Myc-ORF3 | ΔE1/ΔE4ORF3 |
| PCMN-129 | AdSLIC | CMV-C4-ORF3 | ΔE1/ΔE4ORF3 |
| PTFL-131 | Adsembly | | WT |
| PCMN-132 | AdSLIC | CMV-GFP | ΔE1-CMV-GFP; pIX C-term 6x His |
| PTFL-133 | Adsembly | EF1α-[luc-GFP fusion] | ΔE1-EF1α-[luc-GFP]-miR122 |
| PTFL-134 | Adsembly | EF1α-[luc-GFP fusion] | ΔE1-EF1α-[luc-GFP]-miR122; |
| | | | fiber chimera Ad5/3/3 |
| PTFL-135 | Adsembly | EF1α-[luc-GFP fusion] | ΔE1-EF1α-[luc-GFP]-miR122; |
| | | | fiber chimera Ad5/9/9 |
| PTFL-136 | Adsembly | EF1α-[luc-GFP fusion] | ΔE1-EF1α-[luc-GFP]-miR122; |
| | | | fiber chimera Ad5/12/12 |
| PTFL-138 | Adsembly | EF1α-[luc-GFP fusion] | ΔE1-EF1α-[luc-GFP] |
| PCMN-140 | AdSLIC | | ΔE1b-55k/ΔOrf3 |
| PTFL-144 | Adsembly | eGFP | ΔE1-GFP |
| PTFL-147 | Adsembly | EF1α-[luc-GFP fusion] | ΔE1-EF1α-[luc-GFP]-miR122 |
| PTFL-148 | Adsembly | EF1α-[luc-GFP fusion] | ΔE1-EF1α-[luc-GFP]-miR122; |
| | | | fiber chimera Ad5/3/3 |
| PTFL-149 | Adsembly | EF1α-[luc-GFP fusion] | ΔE1-EF1α-[luc-GFP]-miR122; |
| | | | fiber chimera Ad5/9/9 |
| PCMN-152 | AdSLIC | | ΔE1B-55K; E4orf3-I104R |
| PCMN-157 | AdSLIC | | ΔE1B-55K; E4orf3-N82A |
| PCMN-158 | AdSLIC | | ΔE1B-55K; |
| | | | E4orf3-E10K/E52K/E53K/H55K |
| PCMN-159 | AdSLIC | none | Ad11 capsid with Ad5 E1, E3, E4 |
| PCMN-160 | AdSLIC | mCherry | ΔADP |
| PCMN-161 | AdSLIC | mCherry-ADP | ΔADP + mCherry ADP |
| PCMN-162 | AdSLIC | | ΔE1B-55K; E4orf3-Ad9 |
| PCMN-163 | AdSLIC | | ΔE1B-55K; E4orf3-Ad12 |
| PCMN-164 | AdSLIC | | ΔE1B-55K; E4orf3-Ad34 |
| PCMN-165 | AdSLIC | | ΔE1B-55K; |
| | | | E4orf3-E10A/E52A/E53A/H55A |
| PCMN-166 | AdSLIC | CMV-ORF3 EA4 | E4orf3-E10A/E52A/E53A/H55A |
| PCMN-167 | AdSLIC | none | Ad9 capsid with Ad5 E1, E3, E4 |
| PCMN-168 | AdSLIC | none | Ad12 capsid with Ad5 E1, E3, E4 |
| PA-169 | Adsembly | none | WT (version 3) |
| PA-170 | Adsembly | none | WT (version 4) |
| PA-171 | Adsembly | EF1α-[luc-GFP fusion] | ΔE1-EF1α-[luc-GFP]-miR122; |
| | | | hexon E451Q |
| PA-172 | Adsembly | EF1α-[luc-GFP fusion] | ΔE1-EF1α-[luc-GFP]-miR122; |
| | | | fiber chimera Ad5/5/3, hexon E451Q |
| PA-173 | Adsembly | EF1α-[luc-GFP fusion] | ΔE1-EF1α-[luc-GFP]-miR122; |
| | | | fiber chimera Ad5/5/9 hexon E451Q |
| PA-174 | Adsembly | EF1α-[luc-GFP fusion] | ΔE1-EF1α-[luc-GFP]-miR122; |
| | | | fiber chimera Ad5/5/11 hexon E451Q |
| PA-175 | Adsembly | EF1α-[luc-GFP fusion] | ΔE1-EF1α-[luc-GFP]-miR122; |
| | | | fiber chimera Ad5/5/12 hexon E451Q |
| PA-176 | Adsembly | EF1α-[luc-GFP fusion] | ΔE1-EF1α-[luc-GFP]-miR122; |
| | | | fiber chimera Ad5/5/34 hexon E451Q |
| PCMN-184 | AdSLIC | E3-mCherry | ΔE3-12.5K + mCherry |
| PCMN-186 | AdSLIC | | ΔE1B-19k |
| PCMN-187 | AdSLIC | | ΔE1B-19k, ΔE1B-55k |
| PCMN-188 | AdSLIC | | ΔE1B-19k, ΔE1B-55k, ΔE4-ORF3 |
| PCMN-189 | AdSLIC | | E1A ΔLXCXE |
| PCMN-190 | AdSLIC | | E1A ΔLXCXE, ΔE1B-55k |
| PCMN-191 | AdSLIC | | E1A ΔLXCXE, ΔE1B-55k, ΔE4-ORF3 |
| PCMN-192 | AdSLIC | | E1A Δ2-36 |
| PCMN-193 | AdSLIC | | E1A Δ2-36, ΔE1B-55k |
| PCMN-194 | AdSLIC | | E1A Δ2-36, ΔE1B-55k, ΔE4-ORF3 |
| PCMN-195 | AdSLIC | GFP-E1A | GFP-E1A |
| PCMN-196 | AdSLIC | pIX-Flag-GFP | pIX-Flag-GFP |
| PCMN-197 | AdSLIC | none | E1A ΔLXCXE; Ad5/9 capsid swap |
| PCMN-198 | AdSLIC | none | E1A ΔLXCXE; Ad5/11 capsid swap |
| PA-199 | Adsembly | EF1α-[luc-GFP fusion] | ΔE1-EF1α-[luc-GFP] |
| PA-200 | Adsembly | EF1α-[luc-GFP fusion] | ΔE1-EF1α-[luc-GFP]-miR122 |
| PCMN-201 | AdSLIC | | Ad3 capsid with Ad5 E1, E3, E4 |
| PCMN-202 | AdSLIC | | Ad34 capsid with Ad5 E1, E3, E4 |

| | | | | | AdSLIC | |
|---|---|---|---|---|---|---|
| | Components | | | | Macro- | |
| ID | E1 | E3 | E4 | core | module | Notes |
| PTFL-100 | 001 | 001 | 001 | 002 | | pUV12 build. Contains |
| | | | | | | all 4 attB sites. |
| PTFL-101 | 001 | 001 | 001 | 001 | | pUV3 build. Only |
| | | | | | | attB4, attB5, attB3. |
| PCMN-102 | 001 | 001 | 001 | 001 | 001 | Compared to WT Ad5, |
| | | | | | | contains “TA” |
| | | | | | | insertion at 4076bp |
| | | | | | | and “T” at 27173bp. |
| PCMN-103 | 001 | 001 | 001 | 001 | 001 | Contains the attB4 |
| | | | | | | insertion only |
| PCMN-104 | 001 | 001 | 001 | 002 | | Contains the attB6 |
| | | | | | | insertion only |
| PCMN-105 | 001 | 001 | 001 | 001 | | Contains the attB5 |
| | | | | | | insertion only |
| PCMN-106 | 001 | 001 | 001 | 001 | | Contains the attB3 |
| | | | | | | insertion only |
| PCMN-107 | 001 | 001 | 001 | 002 | | Contains attB4, attB6, |
| | | | | | | and attB3 insertions |
| PCMN-108 | 001 | 001 | 001 | 001 | | Contains attB4 and |
| | | | | | | attB3 insertions |
| PCMN-109 | 005 | 001 | 001 | 001 | 001 | |
| PCMN-110 | 001 | 001 | 005 | 001 | 003 | |
| PCMN-111 | 005 | 001 | 005 | 001 | 004 | |
| PTFL-112 | 007 | 003 | 001 | 002 | | Contains all 4 attB |
| | | | | | | insertions |
| PTFL-113 | 007 | 004 | 001 | 002 | | Contains all 4 attB |
| | | | | | | insertions |
| PCMN-117 | 016 | 001 | 006 | 001 | 007 | GFP via R. Shaw |
| PCMN-118 | 001 | 001 | 006 | 001 | 007 | |
| PTFL-120 | 009 | 001 | 001 | 001 | | |
| PTFL-121 | 009 | 004 | 001 | 001 | | |
| PTFL-123 | 009 | 009 | 001 | 001 | | Contains a chimeric |
| | | | | | | fiber with the Ad5 tail |
| | | | | | | and Ad3 knob and |
| | | | | | | shaft |
| PCMN-124 | 012 | 001 | 001 | 001 | 001 | |
| PCMN-125 | 016 | 001 | 006 | 001 | 007 | |
| PCMN-126 | 016 | 001 | 006 | 001 | 007 | |
| PCMN-127 | 016 | 001 | 006 | 001 | 007 | |
| PCMN-128 | 017 | 001 | 006 | 001 | 007 | |
| PCMN-129 | 016 | 001 | 006 | 001 | 007 | |
| PTFL-131 | 001 | 001 | 008 | 001 | | Lacks the repeat |
| | | | | | | sequence between |
| | | | | | | E3-E4 present in |
| | | | | | | previous Adsembled |
| | | | | | | viruses |
| PCMN-132 | 010 | 001 | 001 | 001 | 001 | |
| PTFL-133 | E1-015 | E3-001 | E4-001 | core-003 | | |
| PTFL-134 | E1-015 | E3-009 | E4-001 | core-003 | | Fiber chimera Ad5 |
| | | | | | | tail, Ad3 shaft/knob |
| PTFL-135 | E1-015 | E3-010 | E4-001 | core-003 | | Fiber chimera Ad5 |
| | | | | | | tail, Ad9 shaft/knob |
| PTFL-136 | E1-015 | E3-011 | E4-001 | core-003 | | Fiber chimera Ad5 |
| | | | | | | tail, Ad12 shaft/knob |
| PTFL-138 | E1-014 | E3-001 | E4-001 | core-003 | | Control virus lacking |
| | | | | | | miR122 sites to test |
| | | | | | | their function. |
| | | | | | | Compare to PTFL-133. |
| PCMN-140 | E1-012 | | E4-006 | | ASMM-006 | 3112 equivelent in |
| | | | | | | adslic system |
| PTFL-144 | E1-020 | E3-001 | E4-001 | core-001 | | eGFP ORF replaces |
| | | | | | | the start codon of E1A |
| | | | | | | to the stop codon of |
| | | | | | | E1B-55K |
| PTFL-147 | E1-015 | E3-001 | E4-001 | core-001 | | WT core. This is to |
| | | | | | | compare to the hexon |
| | | | | | | E451Q core with |
| | | | | | | PTFL-133. |
| PTFL-148 | E1-015 | E3-009 | E4-001 | core-001 | | WT core. This is to |
| | | | | | | compare to the hexon |
| | | | | | | E451Q core with |
| | | | | | | PTFL-134. |
| PTFL-149 | E1-015 | E3-010 | E4-001 | core-001 | | WT core. This is to |
| | | | | | | compare to the hexon |
| | | | | | | E451Q core with |
| | | | | | | PTFL-135. |
| PCMN-152 | E1-012 | E3-001 | E4-005 | core-001 | ASMM-004 | |
| PCMN-157 | E1-012 | E3-001 | E4-011 | core-001 | | |
| PCMN-158 | E1-012 | E3-001 | E4-012 | core-001 | | |
| PCMN-159 | E1-023 | E3-026 | E4-001 | core-004 | | Contains all structural |
| | | | | | | proteins of Ad11 with |
| | | | | | | the E1, E3, and E4 |
| | | | | | | proteins of Ad5. |
| PCMN-160 | E1-001 | E3-024 | E4-001 | | ASMM-002 | ADP ORF replaced |
| | | | | | | with mCherry ORF |
| PCMN-161 | E1-001 | E3-025 | E4-001 | | ASMM-002 | ADP ORF replaced |
| | | | | | | with mCherry-ADP |
| | | | | | | fusion ORF |
| PCMN-162 | | | E4-015 | | ASMM-006 | E4-ORF3 from Ad9 |
| | | | | | | replaces the E4-ORF3 |
| | | | | | | from Ad5 |
| PCMN-163 | | | E4-016 | | ASMM-006 | E4-ORF3 from Ad12 |
| | | | | | | replaces the E4-ORF3 |
| | | | | | | from Ad5 |
| PCMN-164 | | | E4-017 | | ASMM-006 | E4-ORF3 from Ad34 |
| | | | | | | replaces the E4-ORF3 |
| | | | | | | from Ad5 |
| PCMN-165 | E1-012 | E3-001 | E4-012 | core-001 | | |
| PCMN-166 | 016 | 001 | 006 | 001 | | |
| | | | | | | Contains all structural |
| | | | | | | proteins of Ad9 with |
| | | | | | | the E1, E3, and E4 |
| PCMN-167 | E1-025 | E3-034 | E4-001 | core-005 | | proteins of Ad5. |
| | | | | | | Contains all structural |
| | | | | | | proteins of Ad12 with |
| | | | | | | the E1, E3, and E4 |
| PCMN-168 | E1-026 | E3-035 | E4-001 | core-006 | | proteins of Ad5. |
| | | | | | | Fully sequenced. WT |
| | | | | | | Adsembly version 3 |
| PA-169 | E1-027 | E3-036 | E4-018 | core-007 | | virus. |
| | | | | | | WT Adsembly version |
| PA-170 | E1-028 | E3-036 | E4-018 | core-008 | | 4 virus. |
| PA-171 | E1-029 | E3-036 | E4-018 | core-009 | | Adsembly version 3 |
| | | | | | | virus |
| PA-172 | E1-029 | E3-037 | E4-018 | core-009 | | Adsembly version 3 |
| | | | | | | virus |
| PA-173 | E1-029 | E3-038 | E4-018 | core-009 | | Adsembly version 3 |
| | | | | | | virus |
| PA-174 | E1-029 | E3-039 | E4-018 | core-009 | | Adsembly version 3 |
| | | | | | | virus |
| PA-175 | E1-029 | E3-040 | E4-018 | core-009 | | Adsembly version 3 |
| | | | | | | virus |
| PA-176 | E1-029 | E3-041 | E4-018 | core-009 | | Adsembly version 3 |
| | | | | | | virus |
| PCMN-184 | X | E3-042 | E4-001 | X | ASMM-002 | |
| PCMN-186 | E1-035 | X | X | X | ASMM-001 | |
| PCMN-187 | E1-036 | X | X | X | ASMM-001 | |
| PCMN-188 | E1-036 | X | X | X | ASMM-007 | |
| PCMN-189 | E1-021 | X | X | X | ASMM-001 | |
| PCMN-190 | E1-030 | X | X | X | ASMM-001 | remaking (Jul. 3, 2011) |
| PCMN-191 | E1-030 | X | X | X | ASMM-007 | remaking (Jul. 3, 2011) |
| PCMN-192 | E1-022 | X | X | X | ASMM-001 | |
| PCMN-193 | E1-037 | X | X | X | ASMM-001 | |
| PCMN-194 | E1-037 | X | X | X | ASMM-007 | cloning in process . . . |
| | | | | | | (May 31, 2011) |
| PCMN-195 | E1-031 | X | X | X | ASMM-001 | cloning in process . . . |
| | | | | | | (May 31, 2011) |
| PCMN-196 | E1-034 | X | X | X | ASMM-001 | cloning in process . . . |
| | | | | | | (May 31, 2011) |
| PCMN-197 | E1-041 | | | | ASMM-014 | |
| PCMN-198 | E1-042 | | | | ASMM-013 | |
| PA-199 | E1-044 | E3-036 | E4-018 | core-007 | | aka, Ad5/ELG |
| PA-200 | E1-029 | E3-036 | E4-018 | core-007 | | aka, Ad5-ELGM |
| PCMN-201 | E1-039 | E3-045 | E4-001 | core-011 | | |
| PCMN-202 | E1-004 | E3-046 | E4-001 | core-012 | | |

TABLE 2

| | | AdSLIC | | | | |
|---|---|---|---|---|---|---|
| | VIRUSES | Macromodules | Parental | Adsembly | | Plasmid |
| ID | Serotype | Mutations | E1 | version | Comments | Map |
| E1- | Ad5 | None | | Original | WT E1 region obtained from | |
| 001 | | | | | Ad5 viral DNA | |
| E1- | Ad34 | None | | Original | WT E1 region obtained from | |
| 002 | | | | | Ad34 viral DNA | |
| E1- | Ad5 | None | | Original | Contains Pacl next to ITR | |
| 003 | | | | | rather than I-Scel | |
| E1- | Ad34 | None | | Original | Contains Pacl next to ITR | |
| 004 | | | | | rather than I-Scel | |
| E1- | Ad5 | 55K-H260A | 001 | Original | H260A mutation in E1B-55K | |
| 005 | | | | | (CAC −> GCC) | |
| E1- | Ad5 | ΔE1A/E1B | 001 | Original | Lacks bp 448-3513 of the | |
| 006 | | | | | Ad5 genome. Replaced with | |
| | | | | | Pacl-Pmel -Ascl SLIC MCS. | |
| E1- | Ad5 | ΔE1A/E1B + | 006 | Original | The CMV-MCS-IRES-GFP-SV40pA | |
| 007 | | CMV-MCS-IRES2-GFP | | | fragment was PCR'd from | |
| | | | | | plasmid pIRES2-eGFP and | |
| | | | | | SLIC'd into the Pacl site | |
| | | | | | of ΔE1A/E1B. | |
| E1- | Ad5 | ΔE1A/E1B + | 006 | Original | The CMV-MCS from plasmid | |
| 008 | | CMV promoter | | | pIRES2-eGFP was SLIC'd into | |
| | | | | | the Pacl site of ΔE1A/E1B. | |
| E1- | Ad5 | ΔE1A/E1B + | 008 | Original | eGFP was inserted using SLIC. | |
| 009 | | CMV-eGFP | | | | |
| E1- | Ad5 | ΔE1A/E1B + | 009 | Original | SAHHHHHH added to the | |
| 010 | | CMV-eGFP; His | | | C-term of pIX | |
| | | tag on pIX | | | | |
| E1- | Ad5 | His tag on pIX | 001 | Original | SAHHHHHH added to the | |
| 011 | | | | | C-term of pIX | |
| E1- | Ad5 | ΔE1B-55K | 001 | Original | 55K ATG mutated to GTG | |
| 012 | | | | | and I90stop (ATT −> TAG) | |
| E1- | Ad5 | ΔE1A/E1B + | 009 | Original | EF1α promoter PCR'd from | |
| 013 | | EF1α-eGFP | | | plasmid pEX-EF1-CFP-VAMP2 | |
| | | | | | and SLIC'd into E1-009 | |
| | | | | | which had been PCR'd to lack | |
| | | | | | the CMV promoter | |
| E1- | Ad5 | ΔE1A/E1B + | 013 | Original | Luciferase PCR'd from plasmid | |
| 014 | | EF1α-(luciferase- | | | pBV-luc. A linker of | |
| | | eGFP fusion) | | | Ala-Ala-Ala-Ala-Thr added | |
| | | | | | between luc and GFP | |
| E1- | Ad5 | ΔE1A/E1B + | 014 | Original | Two miR122 recognition | |
| 015 | | EF1α-(luciferase- | | | sites added in the 3′UTR, | |
| | | eGFP fusion)-miR122 | | | spaced by ATCGATT. | |
| E1- | Ad5 | CMV attR1 - | | Original | E1 replaced by CMV attR1 - | |
| 016 | | Cm - attR2 | | | Cm - attR2 from pAd/CMV/V5 | |
| | | | | | Dest vector | |
| E1- | Ad5 | CMV Myc epitope - | | Original | E1 replaced by CMV Myc | |
| 017 | | attR1 - Cm - attR2 | | | epitope - attR1 - Cm - attR2 | |
| | | | | | from pAd/CMV/V5 Dest vector | |
| E1- | Ad5 | CMV Flag epitope - | | Original | E1 replaced by CMV Flag | |
| 018 | | attR1 - Cm - attR2 | | | epitope - attR1 - Cm - attR2 | |
| | | | | | from pAd/CMV/V5 Dest vector | |
| E1- | Ad5 | ΔpIX + | E1-001 | Original | pIX deleted and replaced | |
| 019 | | Pacl site | | | by a Pacl site. Cut with Pacl | |
| | | | | | and SLIC in other pIX genes. | |
| E1- | Ad5 | ΔE1A/E1B + | E1-001 | Original | (start codon of E1A to stop | |
| 020 | | eGFP | | | codon of E1B 55k replaced | |
| | | | | | with eGFP ORF) | |
| E1- | Ad5 | E1A ΔLXCXE | E1-001 | Original | deleted LXCXE in E1A | |
| 021 | | | | | | |
| E1- | Ad5 | E1A Δ2-36 | E1-001 | Original | deleted residues 2-36 in | |
| 022 | | | | | E1A (p21 binding region, | |
| | | | | | PDZ domain) | |
| E1- | Ad5/11 | Ad5 with Ad11 pIX | E1-019 | Original | pIX from Ad11 was SLIC'd | |
| 023 | | | | | into Pacl-cut E1-019 | |
| E1- | Ad5 | E1A Δ2-36, | E1-005 | Original | del res 2-36 in E1A (p21 | |
| 024 | | 55K-H260A | | | binding, PDZ domain), E1B-55K | |
| | | | | | H260A (CAC−>GCC) | |
| E1- | Ad5/9 | Ad5 with Ad9 pIX | E1-019 | Original | pIX from Ad9 was SLIC'd | |
| 025 | | | | | into Pacl-cut E1-019 | |
| E1- | Ad5/12 | Ad5 with Ad12 pIX | E1-019 | Original | pIX from Ad12 was SLIC'd | |
| 026 | | | | | into Pacl-cut E1-019 | |
| E1- | Ad5 | None | E1-001 | version 3 | attB4 site moved into the | |
| 027 | | | | | 3′UTR of E1B/pIX | |
| E1- | Ad5 | None | E1-001 | version 4 | attB4 site moved directly | |
| 028 | | | | | in front of pIX start codon. | |
| E1- | Ad5 | ΔE1A/E1B + | E1-015 | version 3 | adsembly version 3 of E1-015 | |
| 029 | | EF1α-(luciferase- | | | | |
| | | eGFP fusion)-miR122 | | | | |
| E1- | Ad5 | E1A ΔLXCXE, | E1-021 | Original | mutations of E1-012 | |
| 030 | | ΔE1B-55K | | | combined with E1-021 | |
| E1- | Ad5 | GFP-E1A | E1-001 | Original | GFP inserted in frame before | |
| 031 | | | | | start codon of E1A. Based | |
| | | | | | on Zhao et al. JBC 2006. | |
| E1- | Ad5 | ΔE1A/E1B + | E1-009 | Original | pIX deleted and replaced by | |
| 032 | | CMV-eGFP; | | | a Pacl site. Cut with Pacl and | |
| | | ΔpIX + Pacl | | | SLIC in other pIX genes. | |
| E1- | Ad5/MAV1 | ΔE1A/E1B + | E1-032 | Original | pIX from MAV-1 was SLIC'd | |
| 033 | | CMV-eGFP; with | | | into Pacl-cut E1-032 | |
| | | MAV-1 pIX | | | | |
| E1- | Ad5 | pIX-FLAG-eGFP | E1-001 | Original | linker w/FLAG-eGFP sequence | |
| 034 | | | | | SLIC'd at C-term of pIX | |
| E1- | Ad5 | ΔE1B-19K | E1-001 | Original | start codon of E1B-19K to | |
| 035 | | | | | start codon of E1B-55k deleted | |
| E1- | Ad5 | ΔE1B-19k, | E1-001 | Original | start codon of E1B-19K to | cloning in |
| 036 | | ΔE1B-55k | | | stop codon of E1B-55k deleted | process . . . |
| | | | | | | (May 31, 2011) |
| E1- | Ad5 | E1A Δ2-36, | E1-012 | Original | combined E1-012 and E1-022 | |
| 037 | | ΔE1B-55k | | | mutations | |
| E1- | Ad5 | ΔE1A/E1B | E1-006 | version 3 | Lacks bp 448-3513 of the | |
| 038 | | | | | Ad5 genome. Replaced with | |
| | | | | | Pacl-Pmel-Ascl SLIC MCS. | |
| E1- | Ad5/3 | Ad5 with Ad3 pIX | E1-019 | Original | pIX from Ad3 was SLIC'd | |
| 039 | | | | | into Pacl-cut E1-019 | |
| E1- | Ad5/34 | Ad5 with Ad34 pIX | E1-019 | Original | pIX from Ad34 was SLIC'd | |
| 040 | | | | | into Pacl-cut E1-019 | |
| E1- | Ad5/9 | Ad5 with Ad9 pIX; | E1-025 | Original | deleted LXCXE in E1A from | |
| 041 | | E1A ΔLXCXE | | | E1-025 using single primer | |
| E1- | Ad5/11 | Ad5 with Ad11 pIX; | E1-023 | Original | deleted LXCXE in E1A from | |
| 042 | | E1A ΔLXCXE | | | E1-023 using single primer | |
| E1- | Ad5 | GFP-E1A ΔLXCXE | E1-021 | Original | Same N-terminal fusion of | |
| 043 | | | | | GFP to E1A as E1-031 | |
| E1- | Ad5 | ΔE1A/E1B + | E1-014 | version 3 | adsembly version 3 of E1-014 | |
| 044 | | EF1α-(luciferase- | | | | |
| | | eGFP fusion) | | | | |

TABLE 3

| | | | | | | |
|---|---|---|---|---|---|---|
| | | AdSLIC | | | | |
| | VIRUSES | Macromodules | | Adsembly | | Plasmid |
| ID | Serotype | Mutations | Parental E3 | version | Comments | Map |

| | | | | | |
|---|---|---|---|---|---|
| E3-001 | Ad5 | None | | Original | Wild-type E3-fiber region |
| | | | | | from Ad5 viral DNA |
| E3-003 | Ad5 | Pmel-flanked Ad5 fiber | 001 | Original | Adds Pmel sites directly |
| | | | | | flanking the Fiber |
| | | | | | coding region in order to |
| | | | | | make swaps with other serotypes. |
| E3-004 | Ad5/34 | Ad34 fiber | 003 | Original | Ad34 Fiber was SLIC'd into |
| | | | | | Pmel-cut “Pmel-flanked |
| | | | | | Ad5 fiber” vector. |
| E3-008 | Ad5 | Δfiber shaft/knob | 001 | Original | Lacks the fiber shaft and knob. |
| | | | | | Cut with Pacl to |
| | | | | | SLIC in alternate shaft/knobs. |
| E3-009 | Ad5/3 | Fiber chimera: | 008 | Original | Ad3 fiber shaft knob obtained |
| | | Ad5 tail, Ad3 shaft/knob | | | from viral DNA and SLIC'd |
| | | | | | into Pacl-cut clone E3-008 |
| E3-010 | Ad5/9 | Fiber chimera: Ad5 tail, | 008 | Original | Ad9 fiber shaft knob obtained |
| | | Ad9 shaft/knob | | | from viral DNA and SLIC'd |
| | | | | | into Pacl-cut clone E3-008 |
| E3-011 | Ad5/12 | Fiber chimera: Ad5 tail, | 008 | Original | Ad12 fiber shaft knob |
| | | Ad12 shaft/knob | | | obtained from viral DNA |
| | | | | | and SLIC'd into Pacl-cut |
| | | | | | clone E3-008 |
| E3-012 | Ad5 | ΔUexon-Fiber | 001 | Original | Lacks the U-exon |
| | | | | | and Fiber. Cut with Pacl to |
| | | | | | SLIC in alternate Uexons/Fibers. |
| E3-024 | Ad5 | ΔADP + mCherry | E3-001 | Original | ORF of ADP replaced with mCherry |
| E3-025 | Ad5 | ΔADP + mCherry-ADP | E3-001 | Original | ORF of ADP replaced with |
| | | | | | mCherry-ADP fusion |
| E3-026 | Ad5/11 | Contains the Ad11 Uexon | E3-012 | Original | The Ad11 Uexon and Fiber |
| | | and Fiber. All else is Ad5. | | | were SLIC'd into |
| | | | | | Pacl-cut E3-012. |
| E3-028 | Ad5 | Δfiber knob | E3-001 | Original | Lacks the fiber knob. |
| | | | | | Cut with Pacl to SLIC in |
| | | | | | alternate knobs. |
| E3-029 | Ad5/3 | Fiber chimera: Ad5 | E3-028 | Original | Ad3 fiber knob obtained |
| | | tail/shaft, Ad3 knob | | | from Ad3 viral DNA. |
| E3-030 | Ad5/9 | Fiber chimera: Ad5 | E3-028 | Original | Ad9 fiber knob obtained |
| | | tail/shaft, Ad9 knob | | | from pAd9-SE. |
| E3-031 | Ad5/11 | Fiber chimera: Ad5 | E3-028 | Original | Ad11 fiber knob obtained |
| | | tail/shaft, Ad11 knob | | | from Ad11 viral DNA. |
| E3-032 | Ad5/12 | Fiber chimera: Ad5 | E3-028 | Original | Ad12 fiber knob obtained |
| | | tail/shaft, Ad12 knob | | | from pAd12-SE. |
| E3-033 | Ad5/34 | Fiber chimera: Ad5 | E3-028 | Original | Ad34 fiber knob obtained |
| | | tail/shaft, Ad34 knob | | | from Ad34 viral DNA. |
| E3-034 | Ad5/9 | Contains the Ad9 Uexon | E3-012 | Original | The Ad9 Uexon and Fiber |
| | | and Fiber. All else is Ad5. | | | were SLIC'd into Pacl-cut E3-012. |
| E3-035 | Ad5/12 | Contains the Ad12 Uexon | E3-012 | Original | The Ad12 Uexon and Fiber |
| | | and Fiber. All else is Ad5. | | | were SLIC'd into Pacl-cut E3-012. |
| E3-036 | Ad5 | None | E3-001 | version 3 | The attB3 site moved into |
| | | | | | the 3′UTR for E4. |
| | | | | | The attB5 location |
| | | | | | is unchanged. |
| E3-037 | Ad5/3 | Fiber chimera: Ad5 | E3-029 | version 3 | adsembly version 3 |
| | | tail/shaft, Ad3 knob | | | |
| E3-038 | Ad5/9 | Fiber chimera: Ad5 | E3-030 | version 3 | adsembly version 3 |
| | | tail/shaft, Ad9 knob | | | |
| E3-039 | Ad5/11 | Fiber chimera: Ad5 | E3-031 | version 3 | adsembly version 3 |
| | | tail/shaft, Ad11 knob | | | |
| E3-040 | Ad5/12 | Fiber chimera: Ad5 | E3-032 | version 3 | adsembly version 3 |
| | | tail/shaft, Ad12 knob | | | |
| E3-041 | Ad5/34 | Fiber chimera: Ad5 | E3-033 | version 3 | adsembly version 3 |
| | | tail/shaft, Ad34 knob | | | |
| E3-042 | Ad5 | ΔE3-12.5K + mCherry | E3-001 | Original | |
| E3-045 | Ad5/3 | Contains the Ad3 Uexon | E3-012 | Original | The Ad3 Uexon and Fiber were |
| | | and Fiber. All else is Ad5. | | | SLIC'd into Pacl-cut E3-012. |
| E3-046 | Ad5/34 | Contains the Ad34 Uexon | E3-012 | Original | The Ad34 Uexon and Fiber were |
| | | and Fiber. All else is Ad5. | | | SLIC'd into Pacl-cut E3-012. |

TABLE 4

| | | | | | | |
|---|---|---|---|---|---|---|
| | | AdSLIC | | | | |
| | VIRUSES | Macromodules | | Adsembly | | Plasmid |
| ID | Serotype | Mutations | Parental E4 | version | Comments | Map |

| | | | | | |
|---|---|---|---|---|---|
| E4-001 | Ad5 | None | | Original | Wild-type E4 region obtained |
| | | | | | from pAd/CMV/V5-DEST |
| E4-002 | Ad34 | None | | Original | WT E4 region obtained from |
| | | | | | Ad34 viral DNA |
| E4-003 | Ad5 | None | | Original | Contains Pacl next to ITR |
| | | | | | rather than I-Scel |
| E4-004 | Ad34 | None | | Original | Contains Pacl next to ITR |
| | | | | | rather than l-Scel |
| E4-005 | Ad5 | E4orf3 I104R | E4-001 | Original | Made by quikchange. |
| | | | | | ATA −> CGT |
| E4-006 | Ad5 | ΔE4orf3 | E4-001 | Original | E4-ORF3 is and BAMH1 and |
| | | | | | Xhol sites are inserted |
| E4-011 | Ad5 | E4orf3-N82A | E4-001 | Original | E4-ORF3 is replaced by |
| | | | | | E4-ORF3 mutant |
| E4-012 | Ad5 | E4orf3-E10K/ | E4-001 | Original | E4-ORF3 is replaced by |
| | | E52K/E53K/H55K | | | E4-ORF3 mutant |
| E4-013 | Ad5 | ΔE4orf1 | E4-001 | Original | E4ORF1 deleted, E4ORF2 start |
| | | | | | codon shifted to original |
| | | | | | position of E4ORF1 |
| E4-014 | Ad5 | ΔE4orf4 | E4-001 | Original | E4ORF4 deleted, E4ORF6 start |
| | | | | | codon shifted to original |
| | | | | | position of E4ORF4 |
| E4-015 | Ad5 + Ad9 | E4orf3 Ad9 | E4-001 | Original | E4-ORF3 from Ad9 replaces |
| | | | | | the E4-ORF3 from Ad5 |
| E4-016 | Ad5 + Ad12 | E4orf3 Ad12 | E4-001 | Original | E4-ORF3 from Ad12 replaces |
| | | | | | the E4-ORF3 from Ad5 |
| E4-017 | Ad5 + Ad34 | E4orf3 Ad34 | E4-001 | Original | E4-ORF3 from Ad34 replaces |
| | | | | | the E4-ORF3 from Ad5 |
| E4-018 | Ad5 | None | E4-001 | version 3 | attB3 site moved into |
| | | | | | the 3′UTR of E4. |
| E4-019 | Ad5 | ΔE4orf6/7 | E4-001 | Original | sequence downstream of E4orf6 |
| | | | | | encoding E4orf6/7 deleted, |
| | | | | | retaining E4orf6 |

TABLE 5

| | | AdSLIC | | | |
|---|---|---|---|---|---|
| Go Back To: | VIRUSES | Macromodules | | | |
| ID | Serotype | Mutations | Parental | E2-L2 | Comments |
| E2-001 | Ad5 | none | WT Ad5 | E2-L2 | PCR'd from plasmid pAd/CMV/V5-DEST |

TABLE 6

| | | AdSLIC | | | |
|---|---|---|---|---|---|
| Go Back To: | VIRUSES | Macromodules | | | |
| ID | Serotype | Mutations | Parental | L3-L4 | Comments |
| L3-001 | Ad5 | none | WT Ad5 | L3-L4 | region PCR'd from plasmid pAd/CMV/V5-DEST |

TABLE 7

| | | | | | | | | |
|---|---|---|---|---|---|---|---|---|
| | | AdSLIC | | | Available | | | |
| Go Back To: | VIRUSES | Macromodules | E2-L2 | L3-L4 | as DEST for | Adsembly | | Plasmid |
| ID | Serotype | Mutations | used | used | Adsembly | version | Comments | Map |

| | | | | | | | |
|---|---|---|---|---|---|---|---|
| core- | Ad5 | none | 001 | 001 | Yes | original | pUV3 build. No attB6 site linker. |
| 001 | | | | | | | |
| core- | Ad5 | none | 001 | 001 | Yes | original | pUV12 build. Contains an |
| 002 | | | | | | | attB6 site linking the E2-L2 |
| | | | | | | | and L3-L4 modules. |
| core- | Ad5 | hexon E451Q | 001 | 002 | Yes | original | |
| 003 | | | | | | | |
| core- | Ad11 | none | | | No | original | Contains Ad11 (GenBank BK001453) |
| 004 | | | | | | | 3951-27184bp. Which is |
| | | | | | | | E2B-pVIII. Flanked by Swal |
| | | | | | | | and Fsel. Not sequenced. |
| core- | Ad9 | none | | | No | original | Contains Ad9 (GenBank NC_010956) |
| 005 | | | | | | | 3862-26183bp. This is |
| | | | | | | | E2B-pVIII. Flanked by Pmel and |
| | | | | | | | Pacl. Not sequenced. |
| core- | Ad12 | none | | | No | original | Contains Ad12 (GenBank NC_001460) |
| 006 | | | | | | | 3820-26313bp. This is |
| | | | | | | | E2B-pVIII. Flanked by Swal and |
| | | | | | | | Fsel. Not sequenced. |
| core- | Ad5 | none | | | Yes | version 3 | Sequence added to the 5′ end |
| 007 | | | | | | | by primer annealing to make |
| | | | | | | | compatible with the version 3 E1 |
| | | | | | | | entry vector. |
| core- | Ad5 | none | | | Yes | version 4 | Sequence added to the 5′ end |
| 008 | | | | | | | by SLIC to make compatible |
| | | | | | | | with the version 4 E1 entry vector. |
| core- | Ad5 | hexon E451Q | | | Yes | version 3 | adsembly version 3 of core 003 |
| 009 | | | | | | | |
| core- | Ad3 | none | | | No | original | Contains Ad3 (GenBank DQ086466) |
| 011 | | | | | | | 3938-27403bp. This is |
| | | | | | | | E2B-pVIII. Flanked by Swal and |
| | | | | | | | Pmel. Not sequenced. |
| core- | Ad34 | none | | | No | original | Contains Ad34 (GenBank AY737797) |
| 012 | | | | | | | 3953-27185bp. This is |
| | | | | | | | E2B-pVIII. Flanked by Swal and |
| | | | | | | | Pmel. Not sequenced. |

TABLE 8

| | | | | | | | | | | |
|---|---|---|---|---|---|---|---|---|---|---|
| Go Back To: | VIRUSES | | | E1 | E2-L2 | L3-L4 | E3 | E4 | | Plasmid |
| ID | Serotype | Regions | Mutations | used | used | used | used | used | Comments | Map |

| | | | | | | | | | |
|---|---|---|---|---|---|---|---|---|---|
| ASMM-001 | Ad5 | E2-E4 | none | | 001 | 001 | 001 | 001 | Pacl for E1 insertions |
| ASMM-002 | Ad5 | E1-L4 | none | 001 | 001 | 001 | | | Swal for E3 + E4 insertions |
| ASMM-003 | Ad5 | E1-E3 | none | 001 | 001 | 001 | 001 | | Swal for E4 insertions |
| ASMM-004 | Ad5 | E2-E4 | E4orf3-I104R | | 001 | 001 | 001 | 005 | Pacl for E1 insertions |
| ASMM-005 | Ad5 | E1-L4 | ΔE1B-55K | 012 | 001 | 001 | | | Swal for E3 + E4 insertions |
| ASMM-006 | Ad5 | E1-E3 | ΔE1B-55K | 012 | 001 | 001 | 001 | | Swal for E4 insertions |
| ASMM-007 | Ad5 | E2-E4 | ΔE4ORF3 | | 001 | 001 | 001 | 006 | E4ORF3 is deleted in |
| | | | | | | | | | E4 entry vector |
| ASMM-008 | Ad5 | E1-L4 | E1A ΔLXCXE | E1-021 | | | | | Used core-001, E1A has |
| | | | | | | | | | LXCXE deletion in CR region |
| ASMM-009 | Ad5 | E1-L4 | GFP-E1A | E1-031 | | | | | Used core-001, GFP inserted |
| | | | | | | | | | in frame before start codon |
| | | | | | | | | | of E1A. Based on Zhao |
| | | | | | | | | | et al. JBC 2006. |
| ASMM-010 | Ad5 | E1-L4 | pIX-FLAG-GFP | E1-034 | | | | | Used core-001, linker |
| | | | | | | | | | w/FLAG-eGFP sequence |
| | | | | | | | | | SLIC'd at C-term of pIX |
| ASMM-011 | Ad5 | E2-E4 | hexon E451Q | | E2-001 | L3-002 | E3-001 | E4-001 | Pacl for E1 insertions |
| ASMM-013 | Ad5/11 | E2-E4 | none | | | | E3-026 | E4-001 | Used core-004. |
| ASMM-014 | Ad5/9 | E2-E4 | none | | | | E3-034 | E4-001 | Used core-005. |
| ASMM-015 | Ad5/12 | E2-E4 | none | | | | E3-035 | E4-001 | Used core-006. |
| ASMM-016 | Ad5/3 | E2-E4 | none | | | | E3-045 | E4-001 | Used core-011. |
| ASMM-017 | Ad5/34 | E2-E4 | none | | | | E3-046 | E4-001 | Used core-012. |
| ASMM-018 | Ad5 | E1-L4 | GFP-E1A | E1-043 | | | | | Used core-001 |
| | | | ΔLXCXE | | | | | | |

TABLE 9

| | | | | | | | | |
|---|---|---|---|---|---|---|---|---|
| Go Back To: | VIRUSES | | | E1 | E3 | E4 | core | |
| ID | Serotype | Regions | Mutations | used | used | used | used | Comments |

| | | | | |
|---|---|---|---|---|
| AA-DEST-001 | Ad5 | E1-E4 | CMV - attR1 - | E1 replaced by CMV attR1 - Cm - attR2 |
| | | | Cm - attR2 | from pAd/CMV/V5 Dest vector |
| AA-DEST-002 | Ad5 | E1-E4 | CMV Myc epitope - | E1 replaced by CMV Myc epitope - |
| | | | attR1 - Cm - attR2 | attR1 - Cm - attR2 from pAd/CMV/V5 |
| | | | | Dest vector |
| AA-DEST-003 | Ad5 | E1-E4 | CMV Flag epitope - | E1 replaced by CMV Flag epitope - |
| | | | attR1 - Cm - attR2 | attR1 - Cm - attR2 from pAd/CMV/V5 |
| | | | | Dest vector |

The application's sequence listing, which the Patent Office published only in electronic form, follows.

SEQUENCE LISTING (147 sequences)

SEQ ID NO: 1 - protein, 1149 aa, Canine adenovirus 1
MSLVQSHGTSGLFTEPPNSINQQESSGPSLPAQDATQASASSARAGATPAINSTKRKYRGAVVAQRATLSISAILDNGQCVQIKYHSNLASALTNLCNTNLYDLPACLNKPITVHNLPTLIEEAAASYSLIYYYQRGTVRKVEFRAEIPLLSFPLKFLVKHGKVFLIKDISPMQRCEFCGSFFKVTHTCTLRRRDFYFHHVASHSGDWWEKISFSPIGAPANTERLFIVYDVETYTWHGKFGKQLVPFMLVFQLLGDEHLVNAAKNLATTQNWDTWNSNEQTALYYCITPEKRAIGVKFKTFRDTLQQHFANNLWSHVLCQNPKLMEEAAALGLENPEDITANQLKKFKLQGTPRFIEVYVVGHNITGFDEILLAAQVVSTRAEIPPVFDISRNFMPRAGRLLFNDITYSLPNPSYVPSKDYRHWEQGQVLASDLKTQYIKFMVRDTFSLTHTSLKNAAKAYSLTVSKGCCPYQAVNEFYMLGSYQQDADGFPDLKYWKDQEEYCFNKDLWKKEKKGAYDIIQQTLDYCALDVQVTAQLVNKLIESYQIFIKNSVNLPETYFNVFQRPTISSNSHAIFKQILYRAEKPNAPHLNTIIMAPSNEMYEYVRLSIRGGRCYPTYIGVLQEPVFVYDICGMYASALTHPFPAGSPLNPYERAVAIKAYEHKMQEHKTISYFDEDLLPGIFTIDADPPAEEFLDVLPPFCSRKGGRLCWTNEPLRGEVTTSIDVITLHNRGWKVTLIPDTRTTVFPEWKCLAREYVQLNINAKEKADKSKNQTMRSIAKLLSNALYGSFATKLDNKKTVFSDQIESNIAKEIASGAYVVKSSSYIETDNLCAEIMPEFVVAYPPVNFDVHRLAPPSYSEEYPTENPHAEGPFMQNFNMTSYRYKPIMFIDAEDDDFCLHTLEKSTPLITNNRYASQIASFVLAWTRAFVSEWSQFLYENDAGIPLEKRILKSVYGDTDSLFTTMEGYRLMEEKGKRRLKKNGGNLVFDPNNPELTWLVECETKCEKCGADAYSSESVYLAPKLYALKDTTCPECQYVGKGKLRAKGHATSTLSYDVLKACYYADLQQGSDIFKTSRMSLRRTLTSVQTHVQPFTVTETTLTRKLRPWKDKTLHALDMNRLIPYSRKYPNPRNNETTWMELQWMT

SEQ ID NO: 2 - protein, 1150 aa, Canine adenovirus 2
MSLVQGHGTSGLFTEPPNPINQQESSGPSLPAQDAAQAFASSPRAGATSTIVNPPKRKYKGAVVVQRATLSISAVLDNGQCVEIKYHSNLASALTNLCNTNLYDLPACLNRPITAHNLPALIEEAAAPYSLICYYQRGTVRRVEFQAEVPLLSFPLKFLVKQGKVFLIKDISQMQKCEFCGSFFKVTHTCALRRRDFYFHHVAAHSADWWEKISFTPIGAPPNTERLFIVYDVETYTWHGKFGKQLVPFMLVFQLLGDDHLVNVAKTLATEQNWEIWNGKEQDTLYYCITPEKRAIGVKFKKFRDTLQQHIAASLWSHVICQNPQLQEKATTLGLESPEELTPDQLKKFKLKGNPRFIEVYAVGHNITGFDEILLAAQVVSTRAEIPPVFEICRNFMPRAGRLLFNDITYSLPNPSYVPAKSYEHWEQGQVLASDLKSQYIKFMVRDTFSLTHTSLKNAAKAYSLTVSKGCCPYQAVNEFYMLGSYQQDADGFPDLKYWKDQEEYSFNKDLWIKEKKGAYDIIQQTLDYCALDVQVTAQLVNKLIESYQIFIKNSVNLPETSFNVFQRPTISSNSHAIFKQILYKAEKPNTHHLSTILMAPSNEMYEYVRLSIRGGRCYPTYIGVLQEPVFVYDICGMYASALTHPFPAGSPLNPYERALAIKAYEQKMLNHKTISYFDKDLLPGIFTIDADPPAEEFLDVLPPFCSRKGGRLCWTNEPLRGEIATSIDVITLHNRGWKVTLIPDTRTTVFPEWKCLAREYVQLNISAKEEADKSKNQTMRSIAKLLSNALYGSFATKLDNKKTVFSDQIESNIAKEIASGAYVVKSSSYIETDNLCAEIMPEFVVAYPPVNSDVRQLAPPSCSEEDPTKDPLAEAPFMHNFSMTSYHYKPIMFIDAEDDDFCLHTLEKSTPLIANNRYPSQIASFVLAWTRAFVSEWSQFLYENDAGTPLENRVLKSVYGDTDSLFTTMEGYKLMEEKGKKRLKKNGGKLVFDPSNPELTWLVECETQCEKCGSDAYSSESVYLAPKLYALKDTTCPKCHHVGKGKLRAKGHATSTLSYDVLKACYYADMQQGSDVFKTSRMSLRRTLTSVQAHVQPFTVTETTLTRKLRPWKDKTLHALDMHRLIPYSRKHPNPRNTETTWMELQWMT

SEQ ID NO: 3 - protein, 1135 aa, Bat adenovirus PPV1
VQGDRTRGILPKQTDSNYQPKGSSASLSAEIQSQTTPGTPRPSTASSLKTPRRKYKGAVVAQRATLSISAMLDDGQPAEIKFHSNLLTALTALCNTNLHDLPECFLAPITAPNLPALIEQAAAPYSLICYYNRGSVRRVQFQAESPLLSFPLKFLVKHNKVFLIKDISPVNKCEFCGSFFKVTHTCSLRRRDFYYHHVAAHSSDWWEKIAFAPIGSPAETERLFIVYDIETYTWHGKFGKQLVPFMLVFQLHGDAHLVAAATALARELGWDRWQDKEDVFCIVTPEKRVIGIKFKQFRDRLQQCLANSLWSHFLVANPQIQEEATNRGLACPEDLFPEDLRKIKVKGVPRFIEVYAVGHNITGFDEILLAAQVVSTKAEIPSVFEISRNFMPRAGRLLFNDVTYSLPNPAWVPTKTFEHWEAGQLSACDLKNQFLKFMVRDTFTLTHTSLRNAAKAYSLPVAKGCCPYQAVNDFYMLGTYQQDEQGFPAVEYWKDREEYLLNKALWLDKKTGAYDIVQQTLDYCALDVQVTAQLVQKLIASYQEFIATSVNLPAASFNVFQRPTISSNSHAIFKQILYRAEQPGQGHFNTILLAPSNEMYEYVRASIRGGRCYPTYIGVLAEPVFVYDICGMYASALTHPFPAGAPLNPYERALAMRAYELKMQQCPQISYFDAELLPAIFTIDADPPEDSHLDVLPPFCSRKGGRLCWTNEPLRGEIATSIDVITLHNRGWKVTLVPDARATVFPEWKCIAREYVQLNINAKEKADKDKNQTMRSIAKLLSNALYGSFATKLDNKKTVFSDQIEHNLAKEIAAGEFVVKSSSYIETDNLCAEIMPEFVVAYPPADTPSSEVDASPLSEDPEETPFIGNDRMTSYTYKPITFLDAEDDSFCLQTLERASPLIANNRYPSQIASFVLAWTRAFVSEWSQFLYADDVGIPLEDRQLKSVYGDTDSLFTTLEGYKLMETKGKHRLKKNGGKLVFDPSNPELTWLVECETQCEKCGSDAYSSESVYLAPKLYALKDTTCVSCGHVGKGKLRAKGHATSSLSYDVLKACYLADMQHGSDVFHTSRMSLRRTLTSVQSHVQPFTVTETTLKRRLRPWKDKTLHPLDANRLVPYSRRFPNPRNTETTWMEWQ

SEQ ID NO: 4 - protein, 1142 aa, Bat adenovirus TJM
MALVQNDGARRLFPEQPNSDHQPPGHSPGEPAQIPAPSPAGAPLPGAAAPVKPQRRQYKGAVVTQRATLSVSAVLDDGQFVEIKYHADWKAALASLCHANLCEVPACFENPLTPYSLLTLLEQAAAAHSLICYYQRGKVRRVQMQAAQPLLHFPLQFLVKQAKFTSLKTLPPPTSASSVVLSTRSPTPAPSGAETFTSTTLPPTPPTGGKRQPSPLWDLPRKPKGCLLSMTSRPTPGTGALASNWYPSCQSSSWWARPPWWPRPGSWPRPRDGTPGTLREMSFTASPLRKKPSVSSLRSSGTRCSSCWPPSSGSHFLSQNPDLEAKTRELGLPNSEDISYAALKKLKLQGAPRFIEVYVVGHNITGFDEILLAAQVVSTRAEIPPAFQISRNFMPRAGRLLFNDVTYALPNPAYFPRKDYTDWEKGQLLACDLRNQFIKFMVRDTFTLTHTSLRNAAKAYNLPVSKGCCPYQAVNEFYMLGTYRRDADGFPAEDYWKDAEEYRFNKQLWREEKKDAYDIIQSTLDYCAQDVKVTTQLVLKLTEAYQAFVAESVNLPEASFNVFQRPTISSNSHALFKQILFRAEKPNQSHLGTTLLAPSNEMYEYVRASIRGGRCYPTFIGLLDEPVFVYDICGMYASALTHPFPAGPPLNPFERALAVRRYELKMQTEAQISYFDPELLPAILTIDADPPADEFLDVLPPFCSRKGGRLCWTNEPLRGEVATSIDVITLHNRGWKVRFVPDARATVFPEWKCLAREYVQLNIQAKEQADKNKNQTMRSIAKLLSNALYGSFATKLDNKKTVFSDQIDAETAHDISTGAFVVKSSSYIETDNLCAEIMPEFVVAYPPDPSVALTHTAVANDGDPHPETPFMSPTSVTSYTYKPITFLDAEDDDFCLHTLEKSTPLIANNRYPSQIASFVLAWTRAFVSEWAQFLYADDAGIPLEKRNLKSVYGDTDSLFTTREGYRLMEEKGKKRLKKNGGKLVFDPDHPELTWLVECETQCEKCGGDAYSTESVYLAPKLYALKNTVCTRCGHVGKGKLRAKGHATSELSYDTLKACYLADLQQGSDVFQTSRTSLRRTLASVQAHVQPFTVTETTLTRKLRPWKDKTLHEVDSHRLIPYSRRFPNPRNTETTWMELPWTS

SEQ ID NO: 5 - protein, 1112 aa, Turkey adenovirus 3
MSKYIYTTQNEIPYRLQICKKDIKATIIEIAWTYNLFNCKKLAKKVKDAQSYILICSKYKPTNSDIENVKNLPVKSITIWKKLTGCVMIQNEFKTSHEYIELDFIYDKSKLCWIKSWTQQQKCSSCGRIYSAIHTCNDLRSTYYYNSVDNDTRKFWETIPFQPIGENENTKKLFLIYDIETFTLAETSGVLLNPLLLCFSIFGDDCLINICKTEIAKIKSIQTKNSTYFWFSKVKNFISTEFRKLRNNILFALTDYFTKLILTPENREILEDFAQTQNLESITNINLSEHTNLIMSLKVKPIFIEFYIIGHNIQSFDEILLATQILQDENLDITPLFTVERNFMPRQGRILFNDITIKFPNPDYYVAKEEKKNNKSEILSQIKEGIPHPESIKNLYIKSMVRDTFQITHTSLKEAAKAYNLKIHKGCCPFKAINEYMSTNSLSTDSDSFPSEKYWSSKEEYNEQKEIWLEKKEVKYDIVKELIDYCIKDVKITEELTKTLLNTFDTFIKEELNLKCNFNIFKRPTISSNSHAIFRQLHFKQNGTKASTLPDIVAPSDEMYSFIRQSVRGGRCYPTHLGIFKEKIFVYDICGMYASALTHPMPYGFPIGEKERNNEITKLNEKLKKTKTKLSYFTDIKPMVVMIDAIPPPPEHLDPLPPLCSRQSGKLCWTNEILKNEIVTSIDIITLHNRGWKVNIIPHKLNTVFPTWNTCCLEYVTKNILAKEKATVEKNPVKRAISKLLSNALYGSFATRESNDITIFENHIQENPKIRNQLLNKQLTIDSITTLPTYNLPYVSIENLTFTLKNRTDSAERNLELDDELTSPFNSLEFMDESPASQTSTSTAHVGTYKPFNILDVTSENLTIYMLKSTNLHPTNKRYPTQLASFVLAWTRAFMSEWREILYSDEDSIPVQFKTIKSIYGDTDSLFLTEKGHQNMLKYGQHRIKNKNSQLTFDPKKPSIVWAVECETWCNLCNSPAYSSKSIFLAPKLYALKEITCTTCKNSKTGKLRAKGHCTADITFEILEECFNYHTSELKSGEIFQTERTALKRTLCKSYGKFSPFSVHEIQLIRELRPWNDPTLYFLKTNTLIPYDLYHPNPRITNPILLQEFEDE

SEQ ID NO: 6 - protein, 1112 aa, turkey adenovirus A; identical to SEQ ID NO: 5

SEQ ID NO: 7 - protein, 1108 aa, Great tit adenovirus
MSYMYVTQNETPYRLSISKKSIKETLLEICWNFNFFHCKKICKKLKQCESYILVCCKFKEQNTAIENIKQLPAQKITIWKKLTGCIVIQQEITNSTASSIQLDFVQTKDGLKWIKTWTKQQKCTSCGRIYVTSHTCDYNRSSFYYNQIASSKKYWESIQFQPIGETENTFKLFLVYDIETYTLAESEGINLQPCLLCFTIFGEQELTKIAMEEINRDRTITHSNDNIFYWHSKTKNFISQQFRLLRENILNRMIQVLTTHILSKENKEVLDDFIKLKKLQTYKDIDISKEKNLLLSLTIKPIFLEFYVVGHNIQSFDEILLATQILQPNKFQYEPFLTISRNFMPRQGKILFNDITITFPNPEYHIADEGKENKTAEIIADAREGKPNVKNIKHLYVKSMVRDTFQITHSSLKTAAEAYNLPTSKGCCPFKAINDFYSLGSYRGESETNFPVVTYWSCEDEYKEQLEIWKQKQEKNYDIVKELIEYCCRDVLVTVSLTKCLLETFNSFVTHEFNLNCTFNIFKRPTISSNSHAIFRQIHYKEYGNKLNQLPDIYAPSEEMYEFIRKSVRGGRCYPTFLGRFAEKLYVYDICGMYASALTHPLPYGTPVGKEERDHEIKKFNQLLSSKDEISYFADIKPMIVCINAFPPPPELLDPLPPLCSKASGKLCWTNEPLHKEIVTSIDIITLHNRRWSVSILQHPLNTVFSSWKTCCSNYVKANIQAKEKASKEKNPVKRAISKLLSNALYGSFATKEDNDMVIFEQSLTDKIKHQISQNELQITNITSIPTEQLPSTCYTNIQYFLKSKLPDHRANQQADDELTSPFEAVPEEQPEPSFCSTQTHMTTYKPFNILDVTSDNLTIYMLKSTKPHPTNKRYPTQLASFVLAWTRAFISEWAEILYHDENNIPIENKSLKAIYGDTDSLFLTEAGHRLMLSKGNYRLKSDKTPLIFNPEAPKLTWAVECETECNVCKKPGFCPDSIFLAPKLYALKKIFCPSCNTEFGGKLRAKGHATTHLTFEILLECFNCHKTCSGPARKFTTERRALKRTIHKPYGQFSPFTIHEINLIRELRPWHDPTLVFITDKVLIPYDLQHRNPRVTAPILIEEFEDE

SEQ ID NO: 8 - protein, 1108 aa, frog adenovirus 1
MSAFGSIENDHFRLKLNSKPAKLAILDICWQFNLFNCKKFKHKKHIASLIYSQCSYNSNKSLYELCKTLPIKTLQLWKIQKGSIIRTQKLDLDQGEIIIDLLSPKHLWIVEWFEQNKCKNCGRFFSYNHVCNTNRASYYYHKIANTKTQWETINFSPIGEPKGTKKLFLVYDIETYTKACPVGYKLCPVLLCFTIFGDETLNKEVHELISSNSNILELNNLGECFYWLSKETNYISSKFRKTRLLIQNFLIEKMIKNFLTEENKEILTDYAKAHNYESIYEIDLLKDKNLILTLQAPFINLEFYVIGHNISSFDEILLAHQILQKDTTTIPQPFIQIKRNFLPRQGKILFNDITFSLPYPEYYVHEEENTLTKKEAIEIEKTGEPSLFRTKEICVKTMVRDTYQLTHCSLRLAAEAYGLKTTKGNCPFKAVTEFYSVNSFDKDKFGFPAPKYWTDNEEYMTQLKIWQQNDEPYDLQKELIKYCAQDVNVTKNLTISILNSYNEFIKENFKLTCNYNVFKRPTIPSNSQAIFKQLLYKKHGKKFGKMPDIMAPSAEMYEFVRESVRGGRCYPSLLGEIKEPIYVYDICGMYASALTHPMPFGVPLSQKEKNQEIHILQSKLQNEKTLNYFDPEIKPMIISISAFPPPVEYLTNIPPICSRKSGRLCWTNEALYDETVTIVDVITLHNCGWKVKIEDHPLNTVFPNWNTCCKEYVEVNIAAKEKADKDKNQIMRSISKLLSNSLYGSFATKEDNSMIVFEHMLKSNHIKTKLEQNEIKIDAVFGIPTNGIEHTTIDNKLFYLSNTNTLNDSNAPPIDDELLTPFSEEAYAEEEVEQLAPENSNCHVRTYQPFTLIDVDTEDLTLYSLKSNKKFTENKRYPTQLASFVLSWTRAFMADWNAILYEKDSKSILVKELNAIYGDTDSLFLTEKGHKRMIDHGQHRLKENVKSLVFQECCPDITWAVECETKCPNCKSSAFSNRTIFLAPKLYALKRIVCNSCNTETEGKLRAKGHAKNDMTFELLCTCFEYHKNCHTKGKRFSTERTALKRTLYKPYGKFEPFTIHQVRLIRELRPWHDPTMLERDDGFLIPYYVGHPNPRDKRVKYLEDIDG

SEQ ID NO: 9 - protein, 1255 aa, fowl adenovirus 1
MEADAGPPLTDSVLGPDSHVIRTISAKRLEETRKYFKSFRGNPLRTNVYYIEEQPFRFQPTVFPIGLKKFLRTHRFLLSKRARGYDRIDYLHYARDPERSLPDFKPAQVTVIDFKGKTARLRTVHISEHPALPPMLIAKNVTGEWVWITSRTPVQQCPTCGRHWVRRHSCNERRSAFYYHAVQGSGSDLWQHVHFSCPAQHPHIRQLYITYDIETYTVFEKKGKRMHPFMLCFMLSGDPQLVSRAERLARQDDRLKALDEGFYWLDSHPGEVARRFRNFRSRLQIEFAQNLVDRYAAANRDYCDQLVKDGKYGSVHKIPYELFEKPTSPLSLPDNFYSVDIVVLGHNICKFDELLLATELVERRDLFPEACKCDRSFMPRVGRLLFNDIIFRMPNPNYVKKDASRVERWSRGIVSQQDARSVFVRFMVRDTLQLTSGAKLSKAAAAYALDLCKGQCPYEAINEFISTGRFHADADGFPVERYWEDPSVIAEQKNLWQKEHPGQQYDIVQACLEYCMQDVRVTQKLAHTLHDSYDAYFQRELGMEGHFNIFVRPTIPSNTHAFWKQLTFSNYVREQRATCPPSVPEPHKKKGRTKKKKQPSPDYVAEVYAPHRPMFKYIRQALRGGRCYPNVLGPYLKPVYVFDICGMYASALTHPMPHGMPLDPKFTAQHVGELNRLLTNESHLSYFDARIKPSILKIEAYPPPPEMLDPLPPICSRRGGRLVWTNEALYDEVVTVIDILTLHNRGWRVQVLHDEMNIVFPEWKTLCADYVTKNILAKEKADREKNEVIRSISKMLSNALYGAFATNMDTTRIIFEQDLSEADKKNIYEGTEIVKHVTLLNDDSFNGTEVTLESAPNPFSEESLRQQFRYADDPEQEEPEAEEDEEEEGDDSDRESARKPKNALTEDDPLVAVDLEVEATLATGPYIPEGELSSAHYARANETRFKPMRLLEATPEALTVLHLENLDKQVANKRYATQIACFVLGWSRAFFSEWCDILYGPDRGVHILRREEPRSLYGDTDSLFVTETGYHRMKSRGAHRIKTESTRLTFDPENPGLYWACDCDIKCKACGSDTYSSETIFLAPKLYGLKNSICVNEQCRTVGPGKIRSKGHRQSELIYDTLLRCWRRHEDVQFGAQSNIPELHTRRTIFKTTLLNKVSRYDPFTIHNEQLTRVLRPWKDLTLYEHGDYLYPYDNEHPNPRTAGDVRPVPIVGHEDPLAPLRWEPYAFLSEEECGQVHDLLFADDSSQEAESLGV

SEQ ID NO: 10 - protein, 1121 aa, Fowl adenovirus A
MLIAKNVTGEWVWITSRTPVQQCPTCGRHWVRRHSCNERRSAFYYHAVQGSGSDLWQHVHFSCPAQHPHIRQLYITYDIETYTVFEKKGKRMHPFMLCFMLSGDPQLVSRAERLARQDDRLKALDEGFYWLDSHPGEVARRFRNFRSRLQIEFAQNLVDRYAAANRDYCDQLVKDGKYGSVHKIPYELFEKPTSPLSLPDNFYSVDIVVLGHNICKFDELLLATELVERRDLFPEACKCDRSFMPRVGRLLFNDIIFRMPNPNYVKKDASRVERWSRGIVSHQDARSVFVRFMVRDTLQLTSGAKLSKAAAAYALDLCKGHCPYEAINEFISTGRFHADADGFPVERYWEDPSVIAEQKNLWQKEHPGQQYDIVQACLEYCMQDVRVTQKLAHTLHDSYDAYFQRELGMEGHFNIFVRPTIPSNTHAFWKQLTFSNYVREQRATCPPSVPEPPKKKGRTKKKKQPSPDYVAEVYAPHRPMFKYIRQALRGGRCYPNVLGPYLKPVYVFDICGMYASALTHPMPHGMPLDPKFTAQHVEELNRLLTNESHLSYFDARIKPSILKIEAYPPPPEMLDPLPPICSRRGGRLVWTNEALYDEVVTVIDILTLHNRGWRVQVLHDEMNIVFPEWKTLCADYVTKNILAKEKADREKNEVIRSISKMLSNALYGAFATNMDTTRIIFEQDLSEADKKNIYEGTEIVKHVTLLNDDSFNGTEVTLENAPNPFSEESLRQQFRYADDPEQEEPEAEEDGEEEGDDSDRESARKPKNALTEDDPLVAVDLEVEATLATGPYIPEGELSSAHYARANETRFKPMRLLEATPEALTVLHLESLDKQVANKRYATQIACFVLGWSRAFFSEWCDILYGPDRGVHILRREEPRSLYGDTDSLFVTETGYHRMKSRGAHRIKTESTRLTFDPENPGLYWACDCDIKCKACGSDTYSSETIFLAPKLYGLKNSICVNEQCRTVGPGKIRSKGHRQSELIYDTLLRCWRRHEDVQFGAQSNIPELHTRRTIFKTTLLNKVSRYDPFTIHNEQLTRVLRPWKDLTLYEHGDYLYPYDNEHPNPRTTGDVRPVPIVGHEDPLAPLRWEPYAFLSEEECGQVHDLLFADDSSQEAESLGV

SEQ ID NO: 11 - protein, 1159 aa, Fowl adenovirus 9
MLVTQDQNGDWVWILSRTAVQTCPACGRHWVRNHTCNERRSAFFYHTVQKFGCDLWQHVRFACPAQQPHCKQLFLTYDIETYTVFENKGKRMHPFMLCFMLTGDPDVVRAATDLALVDPEVKTLQEGFYWLDTRPGFVARRFRAYRSRLQQHFARDLVDRYCRANGDYVSKLMSEGKYLSRYDIPYELFDKPTEPLKLPDDFNNVHIVVLGHNICKFDELLLATELVERRDVFPQACRCDRFFMPRVGRLLFNDVLFHLPNPNYDKKDPTRLHRWARGVVAPSDSRTVFVRFMVRDTLQFTSGAKLSKAAAAYALELSKGQCPYEAVNEHVSIGGYEQDSDGFPVARYWEDPSVIAEQKALWRQEHPGRPYDIVQACLEYCMQDVRVTQKLALTLYDSYDKYFKDELGMHGDFNIFLRPTIPSNTHAFWKQLTFTAYVEEQERASTVERPPSKYKRKVALKKNDIKGNPHDADVHDVERASANKNTKKRKKRLPSPEYVAEIYAPHRPMFKYIRQALRGGRCYPSVLGPYRHPVYVFDICGMYASALTHPMPHGMPLDPKFTAKHVDELNELMSSERPISYFDHRIKPCILKVEAYPPPAEHLDTLPPICSRRGGRLVWTNEALYDEVITVIDILTLHNRGWAVTALHDDMNIVFPAWKTVCAEYVSKNIAAKEKADRDKNEVMRSISKMLSNALYGAFATNMDTTRILFEQDLTEDDRRGIYEGTQIVRHVTLLNHDSLAGTVVCPESTPDAFRHHQLRQYFDRKPPTRTAEEENEEQEEEETEESEGESTSKLENALTAREASLAEVDHQLQEALDAPPYIAEDDHAHYATANETVFKPMRLLDAPPEALTVLHLENLDKMVENKRYATQIACFVLGWSRAFFSEWCEILHGPDRGTHLLQRDPQTLYGDTDSLFVTESGYRRMKERGAHRIKGPHTRLTFDPENPALYWACDCDIKCKRCGGDTYSSEAIFLAPKLYGLKDAVCLDPECGHVGSGKIRSKGHRQAELIYDTLERCWQRHEDQSYGAVSAIPELHTRRTIFKTTLLNKVSRYDPFTIHNEQLTRVLRPWKDLTQYRHGDFLYPYDTEHPNPRTADEVRRVPPVGHEEPLAPLRLLAAAAAARIAPEDDGEDSDEFDVPDRSLSIEDCDEILDLLGDP

SEQ ID NO: 12 - protein, 1159 aa, Fowl adenovirus D; identical to SEQ ID NO: 11

SEQ ID NO: 13 - protein, 1085 aa, Snake adenovirus 1
MEASTTTVKARSTHYICGHAGDSFVKIIYYKDKVKAVVSYLNMNDYLNTYALKCVIPEKITKDFFSSCPDDLLYSTLASIQRGYSPKKKEELGGKWEPLLLLYHRGEEYIIRAVVPQRRCEDCGKQFVSSHQCNVRRREFYHHAVLPDTKTWWKPIKFSPIGALSNAKRLFIIYDIETYTFHSGYGKQLVPYLLVMQFKGDSRLRCEAEKIALECGFQPYRQCFMMLNKARDVIGHKFKDMRVQLQKRAASDIWSRYREKHDILSEEGVSYAQLEAMAKDNLLKTDAEPEFTEIIVVGHNITGFDEIVLASHVLEGLPKDEELQMFKITRNFMPRAGKLLFNDVIMALPNAAFQKPKQSTFQRWKTGDLRPEDLKWEGVRFMVRDTVLLTHSSLRNAAQAYQLEVSKGHCPYDALNQYFMVGTYLCDENMYPAREYWSSDEEYLENKPPDGEKYDLVQKAVDYCVNDVKVTVALVKKLCSGYQQFCDEVLKLDCTFNVFQRPTISSTTHAMFKQMFYKSEPSAVGKFLPNLEAPSEVMYEHIRKSVRGGRCYPSFLGVFTEPHLCYDICGMYASALSHPMPYGPTLSPFDSAVAIAEFQRKLDGQSELSYFDPDIFPMIVVADAFPPSLHCLDVLPPLCSKRSGKLCWTNEPLLGEVLTTVDLIMLKNRGWRVKLIQNAECYAVWREWRPLCREYVSINIAAKEKADREKNQTQRSISKLLSNALYGSFATRLDNKQVVFMDDMSSTTQSELRSGKASIVSMTSVCSRSLPQKDTSFWERYFNLPQVEDSISAELNDEPETEPFIGGERSHVIYKPITFLSAECDNLLLATVQSNSDWVKNDRYATQVASFVLAWSRAFMSEWATILYGEDIGVPYEQRKLKSVYGDTDSLFLTGEGHRLMITKGRHKLKSSGNSLVYRDDGNLAWLVECETSCPSCKSDSFSSESCFLAPKLYALKDTTCPSCGLVSGGKLRAKGHAKSCITYDVLKSCFLDHYLLERPTEQYQSERTPIKRTLANGSANSAPFTVVEKQLARVIRPWNDPTMARGTDLSQGFLLFPYDQKRPNPRPQEPLLENPFWDDSSQTA

SEQ ID NO: 14 - protein, 1073 aa, Bovine adenovirus 4
MASKTIVKHRTTHYITGYFEDTPIKIIYYKDFKKSFFNFLQLQGLQPKAQYKSFLKPEDILQYFSEDEYPSVIKIWKLNKKFLYYDECKTDGKTMAVELVQYKNAWFLVKDIKKQQKCENCGVTFNSIHTCNVKRRDFYYHFINHETKHWWEQIKFNPVGALESTKRLFIVYDIETYTYHSTYGKQLLPYLIVFELIGSKTLQKIAAQIAYDCGFMMERGCFFMLNHRHDVIGNAFKKFRIMIQKTVAKNIWLRFSKEQEIETLLNYDEILKLNKEKKLKLAYPQYVEIFVIGHNICGFDEIVLASHVLEGIRDQENLAMFNFSRSFMPRAGKLLFNDVTLSLPNPCYKKPDKTTFERWKKGILLPEDLPWQGLKFMVRDTFLLTHCSLRNAAAAYQLNVSKGHCPYDAINDYFMLGDYEKDKNGYPVEKYWKDKAEYEQNKPNGQYNIIEEAKKYCIDDVKVTAQLVSKLIDGYQEFCNSTLKLPCLFNIFQRPTISSNTQMLFKQLHYREENINSEYLNNLEAPSEKMYSFVRASVRGGRCYPTFLGIYTEPVYVYDICGMYASALTHPMPYGRTLNPFEANTSIDEMQNMLDSSEVLSYFDPRIKAMIVVADCEPPTLEYLDVLPPLCSKKSGKLCWTNEPLINETVTSIDLITLHNRGWKCKIMKNELYAVWPNWKTLCKQYVEINIAAKERADKEKNKTQRSISKLLSNALYGSFATKIDKKKVIFAEDIEEKDKKLLREGKSEITSYTTVISSSLPKSTDYDWNKYFLNLPEVCSTTNKNLNEKSGKTAFIEKNDHVIFKPITFLSAECNDLVLTTIEDKAEWIKNNRYPTQIASFVLAWTRAFMSEWADILYGEDRGKSYSERDLKSLYGDTDSLFLSQKGHELMCSKGAHRLKHNNGKLVFDENEPQLQWLVECETVCEECHSVAFATESCFLAPKLYGLKEIKCTKCNHIGSGKLRAKGHAKECLSYDVLKRCFNDYYLLENPKENFMTKRKSLKRTLQTGNEISKPFTVVEKQLLRILRPWKDMTLRKGIQLSEGYLLYPYDKRHPNPRPQECLTENPFWDDT

SEQ ID NO: 15 - protein, 1071 aa, Ovine adenovirus 7
MASKTIIKQRTTTYITGIYEDTYIKIIYYKNFEKSFYNYFAIQGLKLNSFKKVENVLDVLKLCDSNTPVSLKIWKFNKRFFKMTEEILNGNLLPIELLILKGEIYLIKTVKQQNKCEFCGTIYSNIHNCSSRRRDFYYHNIHHETKLWWEKIKFNPVGAIKAKRLFIVYDIETYTYHSLYGKQLTPYLLVFKLIGCKSLIKIASKIATDIGYEVNRECFVMLNKKEDEIGIAFKKFRTELQISVAKKYWSTFCENHGLESNLSYEDIMVLNKEKKLKQCEPRYIELYVVGHNICGFDEIILASHVLEGIDSEELSMFKLTRSFMPRAGKLLFNDITLSLPNPCFKKPSHTTYERWKNGIINFEDMKWQGIKFMVRDTFLLTHSSLRDAATAYQLSVSKGYCPYRAINDFFMLGEYEKENNGYPVQKYWNSFEEYLQNKPKHNQKYNLLEEAKEYCIDDVIVTAQLVEKLIEGYQEFCTTSLKLECSFNIFQRPTISSNTQALFKQIFYNEEDHPSEFLRNLEAPSEKMYDFVRMSLRGGRCYPSFLGIFEEAIYVYDICGMYASALTHPLPYGKTLNAFEANAQIDYFQELLQRKEKIDYFDNSIKPMIVVADCEPPSLDYLDVLPPLCSKKSGKLCWSNETLINEVLTSIDLITLHNRGWKCKIIKSSEMYAVWSDWKPLCQKYVKVNIMAKEKASKSNNKIQRSISKLLSNALYGSFATRIDKKKVVFAENIEEKDKKRLENGSAEITSYTTVISKSLPKRSFEWNQYFSNLPEMPPKDSKDTNENFNFPLFIGNQDHVTFKPITFLSADCNDLILTTIEDKEEWIKNNRYPTQIASFVLAWTRAFMSEWAEILYGEDMGKPYIEREIKSIYGDTDSLFLTEKGHQLMLSKGLHRLKKYNSNLIFDEKHPCLTWLVECETVCNRCGAEAFSSETCILAPKLYALKDITCKNCKFIGEGKLRAKGHAKNCLNYEILKHCFTDYNLLEQPQKEFQTSRKSLKKTLQTASGTDVPFTVVEKQLTRILRPWKDQTMRKGIQWKKGYLLYPYDKRHPNPRPQEPLTENPFWENF

SEQ ID NO: 16 - protein, 1079 aa, Duck adenovirus A
MAQSSTVSRLRSTKYICGSLNGENVKITYFTDICKALNNILALNRIEKKIFTAPNLGNIIKIFPQNKQPTHITLYKLEKGLIKTEEIFSGGDIEPLLILNHKSELFIIKTYVTQEKCQTCGTLYSTNHNCNVRKTAYFHHIVNKDTRTWWQPIKFHPVGCVETKRLYVVYDIETYTYHSKYGKQLVPYLLVFQLFGEETLIDLAKAEAEMVGYTAYDGCFYILNKDPEVVGQSFKLFRSNLQDKVTNLAWERFCEDNALDPYSRITAKQLQKLNKSQKLNKTAEPQFYEIIIVGHNISGFDEIVLASHILDNVKDKDYFVMFNITRNFLPRAGKLLFNDITFSLPNPQYKKPSRGTFDRWQNGMLDKQDLKWQGVKFMVRDTYLLTHTSLRNAATAYQLPISKGCCPYEAVNEYLMTGNYEQETNGYPTLKYWNNADEYHQNKIKGPYDILKEALIYCIADVKVTSQLTRKLIEGYQSFCNDQIKLTCQFHIFQRPTISSNTHALFKQILYRAEKGQTEHLPGLQAPSEKMYDHIRKSVRGGRCYPSYLGVYEGPIYVYDICGMYASALTHPMPFGRTEDPLTASISIKTFQDKLDSPAKLSYFGESIKPMIVYADCYPPPLEHVDVLPPLCSRKSGRLCWTNEPLLGEVVTTIDLITLHNRGWKCKILTSEQLYAVWPEWKCITKEYVSINIAAKEKADKDKNMTQRSISKLLSNALYGSFATRLDNKKVVFANSMEKGDMERIANGKATITAQTTVINTCLPKKDTTSWERFFSNLPQTTALPVAPSTENEGNDINPKSFIEGAGHVTFKPITHLTAACDDLILSIIEERSEWIENNRYPTQIASFVLAWTRAFTSEWASFLFEDDWGSNIENRSLKVVYGDTDSLFLTQHGHELMITKGKHRIKGYGTALTFDPHNPNLTWLVECETVCPLCKKIAYSTESVYLAPKLYGLKNIYCEHCDVYSAGKLRAKGHAKDCINYETLKKCFIDHDLLTGRDLQYKTQRKMLKRTLTAGNTTNRPFTVVEKQLTRTLRPWADMTMWAVTQSNNGYLLFPYDKKHPNPRQQELLTENPFWEST

SEQ ID NO: 17 - protein, 1079 aa, Duck adenovirus 1; identical to SEQ ID NO: 16

SEQ ID NO: 18 - protein, 1202 aa, Murine adenovirus 3
MAQIISSVGTSSLHPESTNTNLDSSSLTGSNQIAAGTPSNAESQPSSRTPSRGRPRKATVSPLKKRKSKVIAKSHKTLKAPCPNGQYMAVGYFTSFLQPFTNLLCLQDGESFPHPNLCDLFKTSDASHKKPTVRQLTNALQKEEWPAPVTHVWFDGKYLRKSNWPNLKSPAGCYPSEPKQGSLEEKRWSWQKTRPHLTFLEIQKGTGRGPENHQMGLYLVDYIYPCERCEDCGTIFRFKHTCNARRRSYFFHNLQPLSRRWWSKISFSPLGSIPSTQRLFIIYDLETYCWHGSCGKQLVPFMIVMQFWGESTLCSTAYKVAKNTGYINYGSDPYLFYAINPQKQAIGRQFRNFRDRLQETFAREFWERNMTPEMKKYIASLPLGLLDLTPQKLPEAPQLTPKPQFIEVYVVGHNINGFDEIVVAAQVLNNRINFPPPIEVHRHFMPRNGRILFNDITFSLPNPLYEAREDFGSWEEGRLSISDSKIQYVKFMVRDTFALTHTSLRKAAEAYALPVEKGLCPYAAINDFYMTGKYESDSSDGFPSRKYWSSDEEFNEAFAQWRTEQMHDRTSFEPLQYNLIEQTLKYCIKDVQVTTKLVCKLFSSYKKFIQTEVQLPKCSFNIFQRPTISANSHAIFKQTLYTEQRPGKPNFHNCLLAPSREMYDFVRQSIRGGRCYPTYLGEVTEPIYVYDICGMYASALTHPMPTGWPLDPKARAEALENWQIKLSQREKLSYFDSHLLHGIVLIDADPPSEKDLDVLPPFCSRKGGRLCWTNETLRGEVATTIDVITLHNRGWKVKILPEDRTTLFPQMKCLVRTYVTINIAAKERADKQKNMVMRSIAKLLSNALYGSFATRQDNKCTLFTSQLQAGVIKDICEGEQKVKAIHVVETDNLSAEILTPFKALYQPAHKQARQKEPSTPMMAEGRPSSFYSHEKTLNHALSNYKPITFLEAEADDLTLVTLERSSPLVGNDRYASHLASFVLAWTRGFMSEWSEILYESDRGIALERRLNKSVYGDTDSLFVTEHGRILMETRGQHRLKKNGGKLVFNPNSPQLTWLVECETQCKRCNSDAFSPRTIFLAPKLYALQKLICQNCGEEGPGKLRAKGHAVTSLSYDMLHACFEAYRLKDNEPNFYTSRQSLRRTLISMNQQESAFTVTETTLTRSLRPWQSPTLASLGDGRLVPYSSARPNPRNRETTWIAI

SEQ ID NO: 19 - protein, 1214 aa, Murine adenovirus A
MAQIVPAFGSSGIHRKSTDTNLNPSSITGGDSSSSTTTPDADAQSSSRTPARGRPRKKATVSSPKQKQQSKVLQKAHKTLRAACPRGDHMVIGYFTSYVVPFTNLLCLQRCGPFPHPFLLDAFKAADIGHKSISVTSLTRLLQKEEWPAPVNYVWYDGLYIRQSKWPGLKGHAGRYPQVDKDASYEEKRWCWQNYRPELTFLHIQKGLGTKGSNYHKIGLYLVDTMHPCQRCEDCGSFFRFKHTCNARRRSFFFHNLKPLSRQWWTKISFTPLGSIPTTKRLFIIYDLETYCWHGSCGKQLVPFMLVMELYGDMFLCAKAHSIAKQMGYSEHHLRPYILWSINPQKEAIGRQFRRFRDRLQEAFAEELWQNNIYPELQTYIDSLPLGLLDLTPERLEQEAPPLKNTPKFIEVYVVGHNINGFDEIVVAAQVLNNRVNFPPPLRVHRHFMPRNGRILFNDITFSLPNPRYKKRTDFEQWEQGCLTTSDSKIQYVKFMVRDTFALTHTSLRKAAEAYSLPLEKGVCPYAAVNDFYMTGRYDTINIFDGFPHRKYWNSEAEYEEGLQEWKKEKEELRKRCPDRVCPIKYNLIEHTLKYCIQDVTVTTKLVCKLLDSYHHFIQNAVGLPKCLFNIFQRPTISANSHAIFKQTLYSELRPEKPNFDDVLLAPSREMYDFVRQSIRGGRCYPTVLGELKEPIYVYDICGMYASALTHPMPSGWPLEPKARAEALADWTKHLSNSAPISYFNTCLLHGIVLIDADPPCETQLDVLPPFCSRKGGRLCWTNEPLRGEITTTIDVITLHNRGWKVNILPEALTTLFPHMKCLVRKYVTINITAKEKADRQKNMVMRSIAKLLSNALYGSFATRQDNKSTVFASQLYPGTIKEICTGRQKIKALHVVETDNLCAEILTEFKTIYQPSCENTRPPHVADSAELSPRGSHPAPFYREQQVVDHALFNFKPIKFLDAEADDLTLVTLEHSNPLVDNDRYASHLASFVLAWTRGFMSEWSDILYESDRGLQLEKRLIKSVYGDTDSLFVTEAGRNLMESRGKHRLKKNGGKLVFNPEKPSLTWLVECETQCKYCGSDAFSPRTVFLAPKLYALQKLVCPTCGQEGAGKLRAKGHAVASLSYDILLACYEAYRLNESDPNFYTSRQSLKRTLVNMNKQESAFTVTETVLTRSLRPWQNPTLALLEDGRLIPYSTAHPNPRNRETTWIAL

SEQ ID NO: 20 - protein, 1023 aa, Bovine adenovirus 3
MCVYKTYKGKLKITSIPARADRPRLPFPLNFLIHKRKLYLIDTIAEVQRCADCGSYFKQTHTCSTRRRDFYFHHINTQSSDWWEEIKFFPWAAHPDTRRLFVVYDVETYTWHGSFGKQLMPFMLVFTLFGDAQLCEQAVNIAKKQKWSSWPKQANTFYYLNPQRNKVGSLFKQYRDALQEAASTLLWRQFLADNPCLENLCLKLGYVHASDIPFEELCTLELKGQPTFLEVYVVGHNINGFDEIVLAAQVINNKQGIPAAFKVSRNFMPRCGKILFNDLTFALPNPTHAARKDFKDWEEGTPTSADYKFQFVKFMVRDTFALTHTSLRNAAAAYALPVEKGCCPYKAVNEFYMLGTYRTDADSFPQRDYWSSDEEYLLNKSLWLQENSGAYDIVQRTLDYCAMDVLVTAELVKKLQASYLDFVHTSVGLPHCNFNVLQRPTISSNSHAIFRQVVYRSQRPNRSSLGNFLLAPSNEMYDYVRESIRGGRCYPTYIGVLTEAIYVYDICGMYASALTHPFPAGKPLNPFDRALAIKNWQDRLTQLHRPIDYFDRTLLPAIFTIDADPPPEAFLDVIPPFCSRKGGRLCWTNETLRGEVVTCLDAITLHNRGWRVQILNDPRTTVFPQWECLARDYVQLNIAPKERADKEKNQTLRSIAKLLSNALYGSFATKLDNRVTVFSDQMEDKYVRGISDGTYDIKSTAFVETDNLSSSVMAELKITYSPVKQQTDATRKHRQCTPTSNSSSDEDAPFYTLGDPQNHHVTYTYKPITFLEADDSALCLHTLQKKSSLIFNNRYPSHIASFVLAWTRAFVSEWADILYLEDRGTPLEDRILKFVYGDTDSMFLTQRGKELMDTRGKHRLKGNNRPLVFDPTNPQLTWLVECETQCPRCHGDAHSQESVFLAPKLYALKNIYCPSCRRREFWQTSSKGHATSQLSYDLLVTCYYSTEQLGDEKFGTSRLSLRRSLVSRQTHQQPFTVTETTLARTLRPWKDRTLRAIDRHRLAPYSNSHPNPRNKELCWMEMY

SEQ ID NO: 21 - protein, 1163 aa, Bovine adenovirus B
MALVQSDGASSIHPTPGDSENQPQSRAARIRPAPTAATHARTQRSGPATAPQARKAKAAPRPSTSPLKKAPRGPLVAKRSTLRLHGQTEDGTTLEVKYHADVSSSLRNLFELHLEHCPFDLKPENILSFQDTLVRFCNANMCVYKTYKGKLKITSIPARADRPRLPFPLNFLIHKRKLYLIDTIAEVQRCADCGSYFKQTHTCSTRRRDFYFHHINTQSSDWWEEIKFFPWAAHPDTRRLFVVYDVETYTWHGSFGKQLMPFMLVFTLFGDAQLCEQAVNIAKKQKWSSWPKQANTFYYLNPQRNKVGSLFKQYRDALQEAASTLLWRQFLADNPCLENLCLKLGYVHASDIPFEELCTLELKGQPTFLEVYVVGHNINGFDEIVLAAQVINNKQGIPAAFKVSRNFMPRCGKILFNDLTFALPNPTHAARKDFKDWEEGTPTSADYKFQFVKFMVRDTFALTHTSLRNAAAAYALPVEKGCCPYKAVNEFYMLGTYRTDADSFPQRDYWSSDEEYLLNKSLWLQENSGAYDIVQRTLDYCAMDVLVTAELVKKLQASYLDFVHTSVGLPHCNFNVLQRPTISSNSHAIFRQVVYRSQRPNRSSLGNFLLAPSNEMYDYVRESIRGGRCYPTYIGVLTEAIYVYDICGMYASALTHPFPAGKPLNPFDRALAIKNWQDRLTQLHRPIDYFDRTLLPAIFTIDADPPPEAFLDVIPPFCSRKGGRLCWTNETLRGEVVTCLDAITLHNRGWRVQILNDPRTTVFPQWECLARDYVQLNIAPKERADKEKNQTLRSIAKLLSNALYGSFATKLDNRVTVFSDQMEDKYVRGISDGTYDIKSTAFVETDNLSSSVMAELKITYSPVKQQTDATRKHRQCTPTSNSSSDEDAPFYTLGDPQNHHVTYTYKPITFLEADDSALCLHTLQKKSSLIFNNRYPSHIASFVLAWTRAFVSEWADILYLEDRGTPLEDRILKFVYGDTDSMFLTQRGKELMDTRGKHRLKGNNRPLVFDPTNPQLTWLVECETQCPRCHGDAHSQESVFLAPKLYALKNIYCPSCRRREFWQTSSKGHATSQLSYDLLVTCYYSTEQLGDEKFGTSRLSLRRSLVSRQTHQQPFTVTETTLARTLRPWKDRTLRAIDRHRLAPYSNSHPNPRNKELCWMEMY

SEQ ID NO: 22 - protein, 1192 aa, Simian adenovirus 22
MALVQTHGSRGLHPEASDPGRQPSRRRSRQSSPGAVPEPARARRRRAPAAPASGPRAAPAARRASSPPLLSMEPPPPAPKKKRGTVVAPQGHGTLQAVDVATNGAVEIKYHLDLPRALEKLLQVNRAPPLPTDLTPQRLRTLDSSGLRALVLALRPVRAEVWTCLPRGLVSMTTIEADDGHADGQDVVQHQMQPPALHCPLKFLVKGTQVQLVQHVHPVQRCEHCGRLYKHKHECSARRRHFYFHHINSHSSNWWQEIQFFPIGSHPRTERLFLTYDVETYTWMGSFGKQLVPFMLVMKLSGDPPLVELAHDLALQLKWDRWHGDPRTFYCVTPEKMAVGQQFRQYRDRLQTALAVDLWTSFLGANPHLADWALEQHGLSDPAELTYDELKKLPHVKGRPRFVELYIVGHNINGFDEIVLAAQVINNRAEVPQPFRITRNFMPRAGKILFNDVTFALPNPAYKKRTDFQLWEQGGCDDLDFKHQFLKVMVRDTFALTHTSLRKAAQAYALPVEKGCCAYKAVNQFYMVGSYRADQDGFPLEEYWKDREEFLLNRELWKQKGQLKYDIIQETLDYCALDVLVTAELVAKLQDSYAHFIRDSVGLPHAHFNIFQRPTISSNSHAIFRQIVYRAEKPQRSNLGTGLLAPSHELYDYVRASIRGGRCYPTYIGVLEEPLYVYDICGMYASALTHPMPWGTPLSPYERALAVRDWQAALDDLGTCISYFDPELLPGIFTVDADPPDELMLDPLPPFCSRKGGRLCWTNEPLRGEVATSVDLITLHNRGWRVRIVPDKLTTVFPEWKCVAREYVQLNIAAKERADKEKNQTMRSIAKLLSNALYGSFATKLDNKKIVFSDQMDEGLMKGVSNGTVNIKSSSFLETDNLSAEVMPAFEREYLPQQLALLDSDPEDSEDEQGPAPFYTPPAGTPGHVAYTYKPITFLDVDEGDMCLHTLEKVDPLVDNDRYPSHVASFVLAWTRAFVSEWAGFLYDEDRGTPLEDRPIKSVYGDTDSLFVTQRGHELMETRGKKRIKKHGGNLVFDPDRPDLTWLVECETVCASCGADAYAPESVFLAPKLYALKSLLCPVCGHTSKGKLRAKGHAAEALNYELMLNCYLADAQGADRERFSTSRMSLKRTLASAQPGAHPFTVTETTLTRTLRPWKDRTLASLDAHRLVPYSRSRPNPRNEEVCWIEMP

SEQ ID NO: 23 - protein, 1190 aa, Simian adenovirus 23
MALVQTHGSRGLHPEASDPGRQPSRRRSRQSSPGAVPEPARARRRRAPAAPASGPRAAPAARRASSPPLLTDMEAAPKKKRGTVVAPQGHGTLQAVDVATNGAVEIKYHLDLPRALEKLLQVNRAPPLPTDLTPQRLRTLDSSGLRALVLALRPVRAEVWTCLPRGLVSMTTIEADDGHADGQDVVQHEMQPPALHCPLKFLAKGTQVQLVQHVHPVQRCEHCGRLYKHKHECSARRRHFYFHHINSHSSNWWQEIQFFPIGSHPRTERLFLTYDVETYTWMGSFGKQLVPFMLVMKLSGDPPLVELAHDLALQLKWDRWHGDPRTFYCVTPEKMAVGQQFRQYRDRLQTALAVDLWTSFLSANPHVADWALEQHGLSDPAELTYDELKKLPHVKGRPRFVELYIVGHNINGFDEIVLAAQVINNRAEVPQPFRITRNFMPRAGKILFNDVTFALPNPAYKKRTDFQLWEQGGCDDLDFKHQFLKVMVRDTFALTHTSLRKAAQAYALPVEKGCCAYKAVNQFYMVGSYRADQDGFPLEEYWKDREEFLLNRELWKQKGQLKYDIIQETLDYCALDVLVTAELVAKLQDSYAHFIRDSVGLPHAHFNIFQRPTISSNSHAIFRQIVYRAEKPQRSNLGTGLLAPSHELYDYVRASIRGGRCYPTYIGVLEEPLYVYDICGMYASALTHPMPWGTPLSPYERALAVRDWQAALDNLGTCISYFDPELLPGIFTVDADPPDELMLDPLPPFCSRKGGRLCWTNEPLRGEVATSVDLITLHNRGWRVRIVPDELTTVFPEWKCVAREYVQLNIAAKERADKEKNQTMRSIAKLLSNALYGSFATKLDNKKIVFSDQMDEGLMKGVSNGTVNIKSSSFLETDNLSAEVMPAFEREYLPQQLALLDSDPEDSEDEQGPAPFYTPPAGTPGHVAYTYKPITFLDVDEGDMCLHTLEKVDPLVDNDRYPSHVASFVLAWTRAFVSEWAGFLYDEDRGTPLEDRPIKSVYGDTDSLFVTQRGHELMETRGKKRIKKHGGNLVFDPNRPDLTWLVECETVCASCGADAYAPESVFLAPKLYALKSLLCPVCGHTSKGKLRAKGHAAEALNYELMLNCYLADAQGADRERFSTSRMSLKRTLASAQPGAHPFTVTETTLTRTLRPWKDRTLASLDAHRLVPYSRSRPNPRNEEVCWIEMP

SEQ ID NO: 24 - protein, 1190 aa, Simian adenovirus 24
MALVQTHGSRGLHPEASDPGRQPSRRRSRQSSPGAVPEPARARRRRAPAAPASGSRAAPAARRASSPPLLTGMEAAPKKKRGTVVAPQGHGTLQAVDVATNGAVEIKYHLDLPRALEKLLQVNRAPPLPTDLTPQRLRTLDSSGLRALVLALRPVRAEVWTCLPRGLVSMTTIEADDGHADGQDVVQHQMQPPALHCPLKFLVKGTQVQLVQHVHPVQRCEHCGRLYKHKHECSARRRHFYFHHINSHSSNWWQEIQFFPIGSHPRTERLFLTYDVETYTWMGSFGKQLVPFMLVMKLSGDPPLVELAHDLALQLKWDRWHGDPRTFYCVTPEKMAVGQQFRQYRDRLQTALAVDLWTSFLSANPHVADWALEQHGLSDPAELTYDELKKLPHVKGRPRFVELYIVGHNINGFDEIVLAAQVINNRAEVPQPFRITRNFMPRAGKILFNDVTFALPNPAYKKRTDFQLWEQGGCDDLDFKHQFLKVMVRDTFALTHTSLRKAAQAYALPVEKGCCAYKAVNQFYMVGSYRADQDGFPLEEYWKDREEFLLNRELWKQKGQLKYDIIQETLDYCALDVLVTAELVAKLQDSYAHFIRDSVGLPHAHFNIFQRPTISSNSHAIFRQIVYRAEKPQRSNLGTGLLAPSHELYDYVRASIRGGRCYPTYIGVLEEPLYVYDICGMYASALTHPMPWGTPLSPYERALAVRDWQAALDDLDTCISYFDPELLPGIFTVDADPPDELMLDPLPPFCSRKGGRLCWTNEPLRGEVATSVDLITLHNRGWRVRIVPDELTTVFPEWKCVAREYVQLNIAAKERADKEKNQTMRSIAKLLSNALYGSFATKLDNKKIVFSDQMDEGLMKGVSNGTVNIKSSSFLETDNLSAEVMPAFEREYLPQQLALLDSDPEDSEDEQGPAPFYTPPAGTPGHVAYTYKPITFLDVDEGDMCLHTLEKVDPLVDNDRYPSHVASFVLAWTRAFVSEWAGFLYDEDRGTPLEDRPIKSVYGDTDSLFVTQRGHELMETRGKKRIKKHGGNLVFDPNRPDLTWLVECETVCASCGADAYAPESVFLAPKLYALKSLLCPVCGHTSKGKLRAKGHAAEALNYELMLNCYLADAQGADRERFSTSRMSLKRTLASAQPGAHPFTVTETTLTRTLRPWKDRTLASLDAHRLVPYSRSRPNPRNEEVCWIEMP

SEQ ID NO: 25 - protein, 1184 aa, Simian adenovirus 7
MALVQDPGAGGLHAETAHPGPQPPRRRPRQQSPGSSSTAAESSRKRASASAAPRRRAASTPRRSPSTSEIKPPRGTVVAPRGHGLLYAVDASSNTPLEIKYHLHLAHALTGLLKVNLQTLPADLSATSLDSLDSGQLRPLLQRLHPSVAEIWTCGTRGVVVPTVVHPEKEDADADSHRQGEGDVAPPAPRLNFPLRFLVRGRKAHLVQEIQSVQRCDYCGRFYKHQHECSVRRRDFYFHHINTHSSSWWQEISFFPIGSHARTQRLFVTYDVETYTWMGSFGKQLVPFMLVMHVSGEETLVRQACELALELRWDVWNNRPNTFYVVTPEKMAVGKKFREFRDRLQTLLALDLWSSFLAANPQLSDWARAELGLSSPDCLTYEELKKAPALKGQPRFIELYIVGHNINGFDEIVLAAQVINNRSDVPGPFRISRNFMPRAGKILFNDVTFALPNPRQKKRTDFTLWEQGACDDTDFKHQYLKVMVRDTFALTHTSLRKAAQAYALPVEKGCCPYKAVNEFYMLGSYRADEKGFPAEEYWKDREEYLLNRELWEKKQETAYNLVRETLDYCALDVLVTAALVDKLRESYAQFIQDSVGLPGANFNVFQRPTISSNSHAIFRQILYRAEKPHKTHLGDGLMAPSREMYDYVRASIRGGRCYPTYIGVLREPLYVYDICGMYASALTHPMPWGPPLNPYERALAVKKWEDALQDTDTEIDYFNKILLPGIFTIDADPPPANLLDPLPPFCSRKGGRLCWTNEPLRGEVATSVDLITLHNRGWRVRILPDERTAVFPEWRCAAREYVQLNIAAKERADREKNQTLRSIAKLLSNALYGSFATKLDNKKIVFSDQMDPSTIKSIAAGHVNIKSTSFVETDNLSAEIMPAFERAYSPEQLALVHSDAEESDGEGGHAPFYTPLGGADHVTYTYKPITFVDAEEDDLCLHTLEKVDPLIENDRYPSQIASFVLAWTRAFVSEWSQFLYAEDLGTPLEDRPLKSVYGDTDSLFVTEAGHKLMETQGKKRIKKNGGNLVFDPAKPELTWLVECETVCAQCGADAYSPESVFLAPKLYALQCLHCTKCQHVSKGKLRAKGHAAESLSYDLMLRCYLADSQGDDVRFSTSRMSLKRTLASAQPGAHPFTVTETTLTRTLRPWKDRTLAALDAHRLVPYSESRPNPRNQEVCWIEIP

SEQ ID NO: 26 - protein, 1184 aa, Simian adenovirus 1
MALVQDPGAGGLHAETAHPGPQPPRRRPRQQSPGSSSTAAESSRKRATASAAPRRRAASTPRRSPSTSEIKPPRGTVVAPRGHGLLYAVDASSNTPLEIKYHVHLAHALTGLLKVNLQTLPADLSAAALDSLDSGQLRPLLQRLRPSVAEIWTCGTRGVVVPTVVHPEKEGADADSHRQGEGDAAPPSPRLNFPLRFLVRGRKAHLIQEIQSVQRCDYCGRFYKHQHECSVRRRDFYFHHINTHSSNWWQEISFFPIGSHARTQRLFVTYDVETYTWMGSFGKQLVPFMLVMHVSGEETLVRQACELALELRWDVWNDRPCTFYVVTPEKMAVGKKFREFRDRLQTLLALDLWSSFLAANPQLSDWARAELGLSSPDCLTYEELKKAPALKGQPRFIELYIVGHNINGFDEIVLAAQVINNRSDVPGPFRISRNFMPRAGKILFNDVTFALPNPRQKKRTDFTLWEQGACDDTDFKHQYLKVMVRDTFALTHTSLRKAAQAYALPVEKGCCPYKAVNEFYMLGSYRADEKGFPAEEYWKDREEYLLNRELWEKKQETAYNLVRETLDYCALDVLVTAALVDKLRESYAQFIQDSVGLPGANFNVFQRPTISSNSHAIFRQILYRAEKPHKTHLGDGLMAPSHEMYDYVRASIRGGRCYPTYIGVLREPLYVYDICGMYASALTHPMPWGPPLNPYERALAVKKWEDALQDTDTEIDYFNKILLPGIFTIDADPPPANLLDPLPPFCSRKGGRLCWTNEPLRGEVATSVDLITLHNRGWRVRILPDERTAVFPEWRCVAREYVQLNIAAKERADREKNQTLRSIAKLLSNALYGSFATKLDNKKIVFSDQMDPSTIKSIAAGHVNIKSTSFVETDNLSAEIMPAFERAYSPEQLALVHSDAEESDGESGHAPFYTPWGGAGHVTYTYKPITFVDAEEDDLCLHTLEKVDPLIENDRYPSQIASFVLAWTRAFVSEWSQFLYAEDLGTPLEDRPLKSVYGDTDSLFVTEAGHRLMETQGKKRIKKNGGNLVFDPAKPELTWLVECETVCAQCGADAYSPESVFLAPKLYALKCLHCTKCQHVSKGKLRAKGHAAESLSYDLMLRCYLADSQGDDARFSTSRMSLKRTLASAQPGAHPFTVTETTLTRTLRPWKDRTLAALDAHRLVPYSESRPNPRNQEVCWIEIP

SEQ ID NO: 27 - protein, 1169 aa, Simian adenovirus 3
MALVQDHGSGGLHATPPDPGRQSPGDSLCQSAPRAAPAPARAPRRRAAARLARGSRAAAAAGSPSPPPIKTPRGTLVAPRPHGHLFALDARDRHPWEIKYHLHLLPALTHLLEVHRLPPLPDNFRVHDSPSDETLRELVQELKPQLAEVWSVRGRGTVEPSSILPADAEVAARSFPLRFLALGPPQRRKIHLIHSLHSVSRCDHCGRFYKNQHECSTRRRDFYFHHIHAQSSQWWQPIKFFPLGSHPRTERLFLTYDVETYTWMGAFGKQLVPFLLVMKITGEPSLVRLALNLARELGWDAWREHADTFFCLNPQKQAIGRKFREFRDRLQLLLVDHIWQDFVERNPVEDWSRTEHGVEPRELTFQQLEKCPLLRGAPRFIEFYVVGHNINGFDEILLAAQVINNRSEVPGPFRISRNFMPRCGKILFNDVTYSLPNPKHKKRTDYSDWERGMCDDRDFKYQFVKVMVRDTFALTHTSLRKAALAYSLPVEKGCCPYQAVNQFYMLGSYRGDEDGFPLQEYWKDREEYLFNRDLWKEKKEEHYDIVRETLDYCALDVLVTASLVEKLQESYAHFIGEAVGLPDARFNIFQRPTISSNSHAIFRQILFRDEKPQRAHLSRHLLAPSHELYDYVRASIRGGRCYPTYLGVLEEPLYVYDICGMYASALTHPMPWGAPLSPYERALAVRDWETALRRPGHQIDYFDKHLLPAIFTIDADPPDERLLDPLPPFCSRKGGRLCWTNEPLRGEVATSIDVITLHNRGWSVRLVPDERTAVFPGWKCVAREYVQLNIAAKEKADREKNQTQRSIAKLLSNALYGSFATKLDNRQIVFSDQMGPEHLKGISTGALAIKSSSYIETDNLSAQVMPAFTRVYVPQQLAFGDSEPEESDEEGGNAPFYTPAEGQDHVTYTYKPITFLEADEGDMCLHTLEKTDPLIDNDRYPSHIASFVLAWTRAFMSEWCEFLYAEDRGTPLEERALTSVYGDTDSLFVTERGHRLMETRGRKRIKKNGGRLVFDPKDPQLTWLVECETVCSNCGGDAYSPESVFLAPKLYALKCLLCSNCGHVSKGKLRAKGHAAESLDYELMVRCYLADLQGDEKQRFATSRLSLKRTLASAQPGAHPFTVTETTLKRTLRPWRDRTMAQLDAHRLIPYSQSRPNPRNEEVCWIEMP

SEQ ID NO: 28 - protein, 1017 aa, Bovine adenovirus 2
MLEALKPAEGATFTYIKGRLIKQQAAVENPILPFPIFFLIKQNKVFLIKSFQSSQKCEFCGDFFANSHTCSVRRRDFYFHHINFKSSEWWSQISFQPIGSCDDTKRFFLTYDVETYTWHGKHGKQLVPFMLVFHLSGELELVSLSANIAEQQRWLAWDTPHTYYYVSPIKGEIGKAFKDLRYEIQKQVTRLLWDNFVGENPELAEIQERHHVNHIDDITAEMHKIKTKGSPQFIEIYVIGHNICGFDEIVLAAQVIHNRTDVLPAFKINRNFMPRNGKILFNDISFCLPNPKYEKRKDFADWECGKLTAADHKYQFVKFMVRDTFALTHTSLRNAAGAYELPVEKGSCPYEAVNEFYRIGSYQQDEDGFPSLRYWKSSEEYQLNKALWREKNVGAYDIIQQTLHYCVQDVLVTSALVNKLQESYKNFIASQVNLPDASFNIFQRPTISSNSHAIFKQILYREVRPNKANLDNVLLAPSHEMYDYVRQSIRGGRCYPTYIGIMEQPIYVYDICGMYASALTHPFPSGQPLNPYERALAATEWIRKLENLEQKIDYFDECLLPGIFTIDADPPDELFLDELPPFCSRKGGRLCWANEPLRGEVATSIDLITLHNRGWAVRILPDERTTIFPEWKCVAKEYVQLNIGAKEKADKEKNQTMRSIAKLLSNALYGSFATKLDNKKIVFSDQLEASASKTIARGNFSIKSSSFIETDNFSAEIMPEFVVTYPPAPSAELDESDENEEHTLFIPKDSHVTYKYKPITFLETEDDDICLHTLENNSPLIENNRYASHIASFVLAWTRVFVSEWAEFLYAEDRGKPLHQRTIKSVYGDTDSLFVTEEGHRLMEQRGKHRIKKNGGKLVFDPKNPSITWLVECETQCEKCKSDAFSSESVFLAPKLYALKNTVCTCCGHVGKGKLRAKGHATTELCYDTLAKCYLSDAQQGSQRFHTSRLSLKRTLATNQSNAAPFTVTETTLTRTVRPWKDKTLVDIDGHRLMPYSKSNPNPRNNDVCWMTLPWNM

SEQ ID NO: 29 - protein, 1017 aa, Ovine adenovirus A; identical to SEQ ID NO: 28

SEQ ID NO: 30 - protein, 1130 aa, Porcine adenovirus C
MSVVPSDGSGRLLGAEGHPKHQQKGRGHGDEAETGRQTYAGTARGRPARSGPVRGNLVAKRATLSASGTLEDGTHVDIKFHSKTLEALENLFHLHLLQLPPLPPISTSNVSDVLQLLAPREGSVVVYNRGRVSVKQVEIREPKAHFDIQFLLKQGKVYLIKEIQDTQKCEYCGDFFKTSHTCSVRRRDFYFHHVHHKSSDWWENIPFQPLGSYRETERLYITYDVETYTWHGKHGKQLVPFLLVFHISGEPHLVKVAESVAQDLNWCPWTEKHTFYYLNPQKSAVGRMFKSFRDELQNRVTQDLWKTFLSQNPHLVETAARLNLGSVDDITPEVLKKEKICGEPRFIEVYVIGHNISGFDEIVLAAQVICHQSKTIKAFKISRNFMPRNGKILFNDITFGLPNPLFEKRKEFQEWERGSMAVQDMKQQFVKLMVRDTLMLTHTSLRNAAKAYDLPVEKGCCPYEAVNEFYRTGTYQKDEDGFPSLRYWKDQEEYALNKELWREKKCGAYDLISSTLTYCAQDVLVTSSLVRKLQESYQSFIANEVNLPDSSFNIFQRPTISSNSHAIFKQILYRAEKPERQHLGEVLLAPSNEMYDYVRQSIRGGRCYPTYIGILHEPIYVYDICGMYASALTHPMPSGSPLNPFERALAVAVWEDQLKSVGQKMDYFDEKLLPGIFTIDADPPDESFLDVLPPFCSRKGGRLCWTNEPLRGEVATSVDVITLHNRGWRVRLVPDERTTIFPEWKCLAKEYVQLNIAAKEKADREKNQTMRSIAKLLSNALYGSFATRLDNKKIVFSDQLEEESSKNISRGKYSVKSSSFIETDNFSADIMPEFVVAYPPVADVSNEDNEAAEEATPFIGKSDHVTYKYKPITFLDVEDDDVCLHTLESSSSLVLNNRYASHLASFVLAWARVFVSEWSEFLYENDRGVPMEERQIKSVYGDTDSLFVTEEGHRLMKEKGKHRIKKNGGSLVFDPQHPQVTWLVECETRCDKCGEDAYSPTSVFLAPKLYALKSTVCSVCGYVGKGKLRAKGHATSELSFDVLQRCYLEDLQLGSEKFKTSRLSLKRTLASCQSNAAPFTVTEATLTRTLRPWKDKTLTQIDQNRLIPYSTSRPNPRNTDLCWMTLPWDS

SEQ ID NO: 31 - protein, 1136 aa, Tree shrew adenovirus
MALVQSDRPRSLQPESGNSKHQPESRRLRVSSEAATPASSGPQPSRSSAPALTRYKGTVVAKRATCVINATDEEGCFVEIKYHVDTDKSLQALFDVHLSERPEEAGNFTAHNVVAKLEAIRPSQASIVKYFRGKIKTTHVAIENPRFSFPIRFLIKNHQLFLIKEICTTMKCEHCGRYFKGTHTCSARRRDFYFHHINAQSSSWWEPISFFPLGAPPETKRLYITYDVETYTWHGKFGKQLVPFMLVLHLSGDDELLADAITLIRQTSYIPWPKHDNTFYYLNPTKKTVGQLFKSLRNTLQTHFAKKLWQLFLDQNPKITEYCQLKQLDPDQLTADELKNMKIVGTPSFWEVYVVGHNINGFDEIVLAAQIISNKSDVPASFHITRNFMPRNGKILFNDITFGLPNPASKKRQDFTLWEQGGCEASDFKWQYVKFMVRDTFALTHTSLRKAAAAYALDVEKGSCPYKAVNEFYMFGSYQVDEVGFPDEHYWSSREEYLFNREEWLKKKEHAYDIITQTLEYCVMDVVVTAKLVQKLQTSYAAFVQESVNLPESSFNVFQRPTISSNSHAIFRQIVYRAEKPQKTHLGQCLLAPSNEMYDYVRSSIRGGRCYPSYIGLLSEPIYVYDICGMYASALTHPFPSGRPLNPFDRALAVKNWEMRLKNSQTIDYFTPHLLPGIFTIDADPPSETYLDVLPPFCSRKGGRLCWTNESLRGEVATSVDIITLHNRGWKVRIVTDERTTVFPEWKCIAQEYVKLNIAAKEKADKEKNQTIRSIAKLLSNALYGSFATKLDNKKTVFADQLDSSTAKGIANGEFSVKSSSFIETDCLSAEIMSELVVAYSPDTLLHPQQEGATEANTQETPTFIGPTDHVTYTYKPITFLEAEEDEICLQTIEKNSPLIPNDRYPSHIASFVLAWTRAFVSEWASFLYSEDLGTPMERRCLKSVYGDTDSLFLTEEGRRLMETKGKHRIKKNGGKLVFDPANPDLTWLVECETQCEKCGADAFSSQSIFLAPKLYALKDTTCPVCKHVGKGKLRAKGHATDGLSFEIMSKCYFADSQLGSDKFQTSRMSIKRTLASGQSHVQPFTVTETTLTRTLRPWKDKTMTALDQHRLIPYSNSCPNPRNNEVCWIEMSETM

SEQ ID NO: 32 - protein, 1198 aa, Human adenovirus 5
MALVQAHRARRLHAEAPDSGDQPPRRRVRQQPTRAAPAPARARRRRAPAPSPGGSGAPPTSGGSPASPLLDASSKDTPAAHRPPRGTVVAPRGCGLLQAIDAATNQPLEIRYHLDLARALTRLCEVNLQELPPDLTPRELQTMDSSHLRDVVIKLRPPRADIWTLGSRGVVVRSTVTPLEQPDGQGQAAEVEDHQPNPPGEGLKFPLCFLVRGRQVNLVQDVQPVHRCQYCARFYKSQHECSARRRDFYFHHINSHSSNWWREIQFFPIGSHPRTERLFVTYDVETYTWMGAFGKQLVPFMLVMKFGGDEPLVTAARDLAANLGWDRWEQDPLTFYCITPEKMAIGRQFRTFRDHLQMLMARDLWSSFVASNPHLADWALSEHGLSSPEELTYEELKKLPSIKGIPRFLELYIVGHNINGFDEIVLAAQVINNRSEVPGPFRITRNFMPRAGKILFNDVTFALPNPRSKKRTDFLLWEQGGCDDTDFKYQYLKVMVRDTFALTHTSLRKAAQAYALPVEKGCCAYQAVNQFYMLGSYRSEADGFPIQEYWKDREEFVLNRELWKKKGQDKYDIIKETLDYCALDVQVTAELVNKLRDSYASFVRDAVGLTDASFNVFQRPTISSNSHAIFRQIVFRAEQPARSNLGPDLLAPSHELYDYVRASIRGGRCYPTYLGILREPLYVYDICGMYASALTHPMPWGPPLNPYERALAARAWQQALDLQGCKIDYFDARLLPGVFTVDADPPDETQLDPLPPFCSRKGGRLCWTNERLRGEVATSVDLVTLHNRGWRVHLVPDERTTVFPEWRCVAREYVQLNIAAKERADRDKNQTLRSIAKLLSNALYGSFATKLDNKKIVFSDQMDAATLKGITAGQVNIKSSSFLETDNLSAEVMPAFQREYSPQQLALADSDAEESEDERAPTPFYSPPSGTPGHVAYTYKPITFLDAEEGDMCLHTLERVDPLVDNDRYPSHLASFVLAWTRAFVSEWSEFLYEEDRGTPLEDRPLKSVYGDTDSLFVTERGHRLMETRGKKRIKKHGGNLVFDPERPELTWLVECETVCGACGADAYSPESVFLAPKLYALKSLHCPSCGASSKGKLRAKGHAAEGLDYDTMVKCYLADAQGEDRQRFSTSRTSLKRTLASAQPGAHPFTVTQTTLTRTLRPWKDMTLARLDEHRLLPYSESRPNPRNEEICWIEMP

SEQ ID NO: 33 - protein, 911 aa, Bovine adenovirus 3
MATPSMLPQWSYMHIAGQDASEYLSPGLVQFAQATESYFNIGNKFRNPTVAPTHDVTTERSQRLQLRFVPVDREDTQYSYKTRFQLAVGDNRVLDMASTYFDIRGTLDRGASFKPYSGTAYNSFAPKSAPNNTQFRQANNGHPAQTIAQASYVATIGGANNDLQMGVDERQLPVYANTTYQPEPQLGIEGWTAGSMAVIDQAGGRVLRNPTQTPCYGSYAKPTNEHGGITKANTQVEKKYYRTGDNGNPETVFYTEEADVLTPDTHLVHAVPAADRAKVEGLSQHAAPNRPNFIGFRDCFVGLMYYNSGGNLGVLAGQSSQLNAVVDLQDRNTELSYQMLLANTTDRSRYFSMWNQAMDSYDPEVRVIDNVGVEDEMPNYCFPLSGVQIGNRSHEVQRNQQQWQNVANSDNNYIGKGNLPAMEINLAANLWRSFLYSNVALYLPDNLKFTPHNIQLPPNTNTYEYMNGRIPVSGLIDTYVNIGTRWSPDVMDNVNPFNHHRNSGLRYRSQLLGNGRFCDFHIQVPQKFFAIRNLLLLPGTYTYEWSFRKDVNMILQSTLGNDLRVDGATVNITSVNLYASFFPMSHNTASTLEAMLRNDTNDQSFNDYLSAANMLYPIPPNATQLPIPSRNWAAFRGWSLTRLKQRETPALGSPFDPYFTYSGTIPYLDGTFYLSHTFRKVAIQFDSSVTWPGNDRLLTPNEFEIKISVDGEGYNVAQSNMTKDWFLVQMLANYNIGYQGYHLPPDYKDRTFSFLHNFIPMCRQVPNPATEGYFGLGIVNHRTTPAYWFRFCRAPREGHPYPQLALPPHWDPRHALRDPERKFLCDRTLWRIPFSSNFMSMGSLTDLGQNLLYANAAHALDMTFEMDPINEPTLLYVLFEVFDVARVHQPHRGVIEVVYLRTPFSAGNATT

SEQ ID NO: 34 - protein, 917 aa, Ovine adenovirus 6
MATPSMLPQWSYMHIAGQDASEYLSPGLVQFAQATESYFNLNNKFRNPTVAPSHDVTTERSQRLQLRFVPVDREDTQYSYKTRFTLAVGDNRILDMASTYFDIRGTLDRGPSFKPYSGTAYNSLAPRSCPNNTQFAPAQNGYPHRVIAQASYAGAIEGQNDELRVGANERGQPVYADARYQPEPQIGVEGWTAGTLATINQAGARVLRNTPARPCYGSYAAPTNPEGGQARVGTQVQKDYYRVDANGNGNPNAVLYSEEVDLKTPDTHLLHATEVPANGAVTVDALSQLAAPNRPNYIGFRDCFIGLMYYNSGGNLGVLAGQSSQLNAVVDLQDRNTELSYQMLLANTTDRSRYFSMWNQAMDTYDPEVRVIDNIGVEDEMPNYCFPMSGVAFGAPMTKVQKNQNAWQAVANGGNMYVSRGNLGAMEINLSANLWRSFLYSNVALYLPDDQKYTPTNVRLPANTNTYEYMNGRKPLQGFLDSYVNIGTRWSPDAMDNVNPFNHHRNAGLRYRSQLLGNGRYCDFHIQVPQKFFAVRNLLLLPGTYTYEWSFRKDVNMILQSTLGNDLRVDGASINITSVNLYASFFPMSHNTASTLEAMLRNDTNDQSFNDYLSAANMLYPIPPNATQLPISIPSRNWAAFRGWSFTRLKQRETPALGSAFDPYFTYSGTIPYLDGTFYLSHTFRRVAIQFDSSVTWPGNDRLLTPNEFEIKRTVDGEGYTVAQSNMTKDWFLVQMLAHYNMGFQGYQLPPDYKDRTFSFLHNFTPMCRQVPNPANEGHQQLRITRLHNNSGFIGFDTGAGSREGHPYPANWPYPLIGPDAVPSVTQRKFLCDRTLWRIPFSSNFMSMGSLTDLGQNLLYANAAHALDMTFEVDPINEPTLLYVLFEVFDVARVHQPHRGVIEVVYLRTPFSAGNAT

SEQ ID NO: 35 - protein, 911 aa, Tree shrew adenovirus
MATPSMLPQWSFMHIAGQDASEYLSPGLVQFARATESYFNIGNKFRNPTVAPTHDVTTERSQRLQLRFVPVDKEDTQYTYKTRFQLAVGDNRVLDMGSTYFDIRGTLDRGPSFKPYSGTAYNSLAPKSATNNAQYTSGGKTATYAQASFISEIVEVGGQYGIKVGEDNTGADILADPNYQPEPTVGGEGWTVELGTIDSAGGRVLSATTPKAPCYGSYAAPTNNNGGQTTGQVNVKFFKEGQGAGNPTVALYSETVDMQSPDTHLVYATEPGALPDGLGQQSAPNRPNYIGFRDNFIGLMYYNSNGNLGVLAGQASQLNAVVDLQDRNTELSYQLMLDSLVDRSRYFSMWNQAVDSYDPDVRVLENNGVEDELPNYCFPLSGVGLTELYTGVARNGGNWAADNDAAASQIAVGNVHAMEINIAANLWRGFLYSNVALYLPDEYKYTPINVTLPENTNTYAYMNGRVPANNLVDSFVNVGARWSPDVMDNVNPFNHHRNAGLRYRSQLLGNGRYCRFHIQVPQKFFAIKNLLLLPGTYTYEWSFRKDVNMILQSTLGNDLRVDGASINIESVNLYASFFPMSHNTASTLEAMLRNDTNDQCFTDYLSAANMLYPIAANATNVPISIPSRNWAAFRGWSFTRLKQKETPALGSPYDPYFTYSGSIPYLDGTFYLNHTFRRVAIQFDSSVSWPGNDRLLTPNEFEIKRAVDGEGYSTAQSTITKDWFLTQMLANYNIGYQGYYLPDGYKDRLYSFLRNFQPMCRQVVDEANYANYKAVSITHQHNNSGFTGFASAAVPREGHPYPANWPYPLIGDTAVPSVTQRKFLCDRTLWRIPFSSNFMSMGTLSDLGQNLLYANSAHALDMIFEVDPMPEPTLLYVLFEVFDVARVHQPHRGVIEVVYLRTPFSAGNATT

SEQ ID NO: 36 - protein, 905 aa, Canine adenovirus 2
MATPSMLPQWSYMHIAGQDAAEYLSPALVQFAQATSSYFKLDNKFRNPTVAPTHDVTTERSQRLQLRFVPVMQEDGQYTYKTRFQLAVGDNRVLDMASTYFDIRGTLDRGPSFKPYSGTAYNALAPKAGANNCLFNGQGANINTLAQVPSAGAITVNGQAAVTNNTYQPEPQLGPESWVDGSLAELGDASGRALKASTPRMPCYGSYAPPTNENGGQATGPVESRFYKVTTNNNNEADAMLYTEDVNLQAPDTHLVHQVPEGQVTGVQGLGQQAAPNRPNYIGFRDNFIGLMYYNSNGNLGVLAGQSSQLNAVVDLQDRNTELSYQLLLDALTDRSRYFSMWNQAVDSYDQDVRIIDNHGVEDDMPNYCYPLSGMGPLTNMTTMKVNNQNFQAENTNVGPIQKIGFGNVEAMEINLNANLFKSFLYSNVALYLPDAFKYTPENIVAPANVNTYAYMNVRLPAANLIDTFVNIGARWSPDVMDTVNPFNHHRNAGLRYRSQLLGNGRYCSFHIQVPQKFFAIKNLLLLPGTYTYEWSFRKDVNMILQSSLGNDLRVDGATINIQSINLYASFFPMAHNTASTLEAMLRNDVNDQSFADYLSSANMLYPIPANTTNLPISIPARNWAGFRGWSFTRIKQRETPALGSPYDPYFTYSGSIPYLDATFYLSHTFRRVSIMFDSSVSWPGNDRLLTPNEFEIKRYVDGEGYNVAQSNMTKDWFMVQMLAHYNIGYQGYHLPESYKDRMYSFLRNFEPMCRQLVDVANYAAYQPVTVGHQHNNSGYASALSAFNPREGHPYPANWPYPLIGANAVPTVTQKKFLCDRSLWRIPFSSNFMSMGTLTDLGQNLLYSNSAHALDMTFEVDAMNEPTLLYVLFEVFDVARVHQPHRGVIEVGYLRTPFSAGNATT

SEQ ID NO: 37 - protein, 905 aa, Canine adenovirus 1
MATPSMLPQWSYMHIAGQDAAEYLSPALVQFAQATSSYFKLDNKFRNPTVAPTHDVTTERSQRLQLRFVPVMQEDGQYTYKTRFQLAVGDNRVLDMASTYFDIRGTLDRGPSFKPYSGTAYNALAPRAGANNCLFNGSGANINTLAQVPFAGAITVNGQAAVTDNTYQPEPQLGPESWVDGTLADLGDASGRALKASTPRMPCYGSYAPPTNENGGQATGAVERRFYKVTTNNNNEADALLYTEDVNLQTPDTHLVHQVSDDQVTGVQGLGQQAAPNRPNYIGFRDNFIGLMYYNSNGNLGVLAGQSSQLNAVVDLQDRNTELSYQLLLDALTDRSRYFSMWNQAVDSYDQDVRIIDNHGVEDDMPNYCFPLSGMGPLTNMTAMKVNNQNFQTDNTNVGPIQKIGFGNVEAMEINLNANLFKGFLYSNVALYLPDAYKYTPDNIVAPANANTYAYMNVRLPAANLIDTFVNIGARWSPDVMDSVNPFNHHRNAGLRYRSQLLGNGRYCSFHIQVPQKFFAIKNLLLLPGTYTYEWSFRKDVNMILQSSLGNDLRVDGASINIQSINLYASFFPMAHNTASTLEAMLRNDVNDQSFADYLSAANMLYPIPANTTNLPISIPARNWAGFRGWSFTRIKQRETPALGSPYDPYFTYSGSIPYLDSTFYLSHTFRRVSIMFDSSVSWPGNDRLLTPNEFEIKRYVDGEGYNVAQSNMTKDWFLVQMLAHYNIGYQGYHLPESYKDRMYSFLRNFEPMCRQLVDVTNYATYQSVTVGHQHNNSGYASALSTFNPREGHPYPANWPYPLIGVNAVPTVTQKKFLCDRTLWRIPFSSNFMSMGTLTDLGQNLLYSNSAHALDMTFEVDAMNEPTLLYVLFEVFDVARVHQPHRGVIEVVYLRTPFSAGNATT

SEQ ID NO: 38 - protein, 908 aa, Bat adenovirus TJM
MATPSMLPQWSYMHIAGQDAAEYLSPALVQFAQATSSYFKLDNKFRNPTVAPTHDVTTERSQRLQLRYVPVMQEDGQYTYKTRFQLAVGDNRVLDMASTYFDIRGTLDRGPSFKPYSGTAYNPLAPKAGANNCLFNGTGNNINTVAQVTTLGNITVQGLNGVTNSAYEPYPQQGPESWTSGSLEAIGDAGARALKATVPRQPCYGSYAAPTNENGGQSTGTITPAYYKKTTTAGATDVDAMLYTEEVALQAPDTHLVYKVAEADAKGIPGVGQQAAPNRPNYIAFRDNFVGLMYYNSNGNLGVLAGQSSQLNAVVDLQDRNTELSYQLLLDALTDRTRYFSMWNQAVDSYDHDVRIIDNHGVEDDMPNYCFPLSGMGVMEAVSSMKVNTANNGFEANNTNQGPVQQIGFGNVNAMEINLNANLFKGFLYSNIALYLPDDYKYTPQNVTEPANHNTYAYMNIRLPAANLVDTFVNVGARWSPDVMDTVNPFNHHRNAGLRYRSQLLGNGRYCSFHIQVPQKFFAIKNLLLLPGTYTYEWSFRKDVNMILQSSLGNDLRVDGASITIQSINLYASFFPMAHNTASTLEAMLRNDVNDQTFADYLSAANMLYPIPANTTNLPISIPARNWAGFRGWSFTRIKQKETPALGSPFDPYFTYSGTMPYLDGTFYLSHTFRRVSIMFDSSVSWPGNDRLLTPNEFEIKRTVDGEGYNVAQSNMTKDWFLVQMLAHYNIGYQGYHLPESYKDRMYSFLRNFEPMCRQQVDTQKAENYQAVTINNQHNNSGYASALSASNPREGHPYPANWPYPLIGATALPSVTQKKFLCDRTLWRIPFSSNFMSMGTLTDLGQNLLYSNSAHALDMTFEVDEMNEPTLLYVLFEVFDVARVHQPHRGVIEVVYLRTPFSAGNATT

SEQ ID NO: 39 - protein, 939 aa, Porcine adenovirus 3
MATPSMMPQWSYMHISGQDASEYLSPGLVQFSQATETYFNLNNKFRNPTVAPTHDVTTERSQRLQLRFVPVDKEDTQYTYKTRFQLAVGDNRVLDMASTFFDIRGTLDRGPSFKPYSGTAYNIMAPKSAPNNCQYLDPKGETEAGKVNTIAQASFVGPIDETTGDIKITEEEDEETTIDPLYEPQPQLGPSSWSDNIPSATSGAGRVLKQTTPRQPCYGSYASPTNIHGGQTKDDKVTPLYFTNNPATEAEALEENGLKPNVTLYSEDVDLKAPDTHLVYAVNQTQEFAQYGLGQQAAPNRANYIGFRDNFIGLLYYNSNGNQGMLAGQASQLNAVVDLQDRNHRTSYQLFLDSLYDRSRYFSLWNQGIDSYDKDVRVLGNNGVEDEMPNFCFPIGAIETNMTFTQLKKSENGGSRATTWTKENGDDGGNGAEHYLGIGNLNAMEINLTANLWRSFLYSNVALYLPDKYKFSPPNVPIDPNTHSYDYINKRLPLNNLIDTFVNIGARWSPDVMDNVNPFNHHRNYGLRYRSQLLGNGRYCKFHIQVPQKFFALKSLLLLPGATYTYEWSFRKDVNMILQSTLGNDLRADGAKINIESVNLYASFFPMAHNTASTLEAMLRNDTNNQTFIDFLSSANMLYPIPANVTNLPISIPSRNWAAFRGWSFTRLKHNETPALGSPFDPYFTYSGSIPYLDGTFYLGHTFRRISIQFDSSVAWPGNDRLLTPNEFEVKRTVDGEGYTVAQTNMTKDWFLVQMLAHYNIGYQGYHLPEGYRDRTYSFLRNFEPMCRQVPDYANHKDEYLEVPTTNQFNSSGFVSAAFTAGIAQGHPYPANWPYPLIGEDAVQTVTQRKFLCDRTLWRIPFSSNFMSMGTLTDLGQNLLYANSAHALDMTFEVDAMDEPTLLYVLFEVFDVCGVHQPHRGVIEAVYLRTPFSAGNATT

SEQ ID NO: 40 - protein, 938 aa, Porcine adenovirus 3
MATPSMMPQWSYMHISGQDASEYLSPGLVQFSQATETYFNLNNKFRNPTVAPTHDVTTERSQRLQLRFVPVDKEDTQYTYKTRFQLAVGDNRVLDMASTFFDIRGTLDRGPSFKPYSGTAYNIMAPKSAPNNCQYLDPKGETEAGKVNTIAQASFVGPIDETTGDIKITEEEDEETTIDPLYEPQPQLGPSSWSDNIPSATSGAGRVLKQTTPRQPCYGSYASPTNIHGGQTKDDKVTPLYFTNNPATEAEALEENGLKPNVTLYSEDVDLKAPDTHLVYAVNQTQEFAQYGLGQQAAPNRANYIGFRDNFIGLLYYNSNGNQGMLAGQASQLNAVVDLQDRNTELSYQLFLDSLYDRSRYFSLWNQAIDSYDKDVRVLENNGVEDEMPNFCFPIGAIETNMTFTQLKKSENGGSRATTWTKENGDDGGNGAEHYLGIGNLNAMEINLTANLWRSFLYSNVALYLPDKYKFSPPNVPIDPNTHSYDYINKRLPLNNLIDTFVNIGARWSPDVMDNVNPFNHHRNYGLRYRSQLLGNGRYCKFHIQVPQKFFALKSLLLLPGTYTYEWSFRKDVNMILQSTLGNDLRADGAKINIESVNLYASFFPMAHNTASTLEAMLRNDTNNQTFIDFLSSANMLYPIPANVTNLPISIPSRNWAAFRGWSFTRLKHNETPALGSPFDPYFTYSGSIPYLDGTFYLGHTFRRISIQFDSSVAWPGNDRLLTPNEFEVKRTVDGEGYTVAQTNMTKDWFLVQMLAHYNIGYQGYHLPEGYRDRTYSFLRNFEPMCRQVPDYANHKDEYLEVPTTNQFNSSGFVSAAFTAGMREGHPYPANWPYPLIGEDAVQTVTQRKFLCDRTLWRIPFSSNFMSMGTLTDLGQNLLYANSAHALDMTFEVDAMDEPTLLYVLFEVFDVCGVHQPHRGVIEAVYLRTPFSAGNATT

SEQ ID NO: 41 - protein, 914 aa, Bovine adenovirus 10
MATPSMMPQWSYMHIAGQDASEYLSAGLVQFARATDSYFSLGNKFRNPTVAPTHDVTTERSQRLQLRFVPVDKEDTQYTYKTRFQLTVGDNRVLDMGSTYFDIRGVIDRGPSFKPYSGTAYNNLAPRSAPNNCFFKNDNGGHPDVAYAQLPFVGTREQQNLMVLNAEGQRVAADPIYQPEPQYGVDAWPQNRLGDFNAGRALKSDVTHLPCYGSYASPTNIHGGQSTDDDITKVFFRRENAAGAPEGVLYSETVALEQPDTHLSFKVTADQTTKLLGLAQQACPNRPNYIGFRDNFIGLMYYNSNGNLGVLAGQASQLNSVVDLQDRNTELSYQLMLDNLYDRSTYFSLWNQAIDSYDPDVRIIENHGVEDEIPAFCFPISAIQTTVFYTQMKTDDNGNNWTPVDNATQNQYVDRGNLQCMEVNISGNLWRSFLYSNVGLYLPDRLKFTPENVEEPENHDTYDYMNIRIPPSGLVENYINIGARWSLDIMDNVNPFNHHRNAGLRYRSQLLGNGRYCEFHIQVPQKFFAIKNLLLLPGTYNYEWSFRKDVNMIFQSSLGNDLRVDGAKITIESVNLYASFFPMAHNTASTLEAMLRNETNDQTFNDYLSAANMLYPIPPQTSNVPITIPSRNWAAFRGWSFTRLKAKETPALGSPYDPYFTYSGSIPYLDGTFYLNHTFRKVAIQFDSSVSWPGNDRLLSPNEFEIKRQVDGEGYNIAQSNMTKDWFLTQMLCHYNIGYQGYHLPDSYKDRTYSFLKNFQPMCRQIVTANTFDNYKAVTIANQHNNSGFIGFPNPVSAREGHPYPANWPYPIIGTTAHRAETQRKFLCDRTLWRIPFSSNFMSMGSLTDLGQNLLYSNSAHALDMTFEVEPMDEPTLLYVLFEVFDVCRIHQPHRGVIETVYLRTPFAAGNATT

SEQ ID NO: 42 - protein, 908 aa, Ovine adenovirus 1
MATPSMMPQWSYMHIAGQDASEYLSPGLVQFAQATETYFKLGNKFRNPTVAPTHDVTTERSQRLQLRFVPVDREDTQYSYKTRFQLAVGDNRVLDMASTYFDIRGTLDRGPSFKPYSGTAYNPLAPKASVNNTFFTAAANNNAQAIAQAPFVAEIVANTGEIEIDGEPIDNTYQPEPQLGEESWLSGTINPINEATGRILNTNTDPLPCYGSYANPTNKDGGQATGNKLTVNFKLGNQAGDPDTAFIMEDVNLTAPDSHLVYKVPQDQAGKIAAVAQQAGPNRPNYIGFRDNFIGLMYYNSNGNLGVLAGQASQLNAVVDLQDRNTELSYQLMLDSLYDRSRYFSIWNQAVDSYDPDVRIIENHGVEDEMPNYCFPISGIFPGSPSVRVTRQQNAWAKAPGTEDNNYINKGNLECMEINLNANLWRGFLYSNVALYLPDALKFTPPNVTLPQNQNTYAYMNGRIPAGGLVDTFVNIGARWSLDVMDNINPFNHHRNAGLRYRSQLLGNGRYCQFHIQVPQKFFAIKNLLLLPGTYTYEWSFRKDVNMVLQSTLGNDLRVDGASITIDSVNLYASFFPMAHNTASTLEAMLRNDTNDQSFIEYLSSANMLYPIPANATNLPISIPSRNWAAFRGWSFTRIKQKETPALGSPFDPYFTYSGTIPYLDGTFYLNHTFRRVSIQFDSSVQWPGNDRLLTPNEFEIKRMVDGEGYNVAQSNMTKDWFLVQMLANYNIGYQGYHLPDSYKDRTYSFLRNFEPMSRQVVDIANYAAYQDVPLTHQHNNSGFTGFGSAALPREGHPYPANWPYPLIGANAAPTLTQRKFLCDRTLWRIPFSSNFMSMGSLTDLGQNLLYANAAHALDMTFEVDAMDEPTLLYVLFEVFDVVRVHQPHRGVIETVYLRTPFSAGNAT

SEQ ID NO: 43 - protein, 908 aa, Bovine adenovirus 1
MATPSMMPQWSYMHIAGQDASEYLSPGLVQFAQATETYFKLGNKFRNPTVAPTHDVTTERSQRLQLRFVPVDREDTQYTHKTRFQLAVGDNRVLDMASTYFDIRGTLDRGPSFKPYSGTAYNALAPKGSINNTFVSVAGNNNAKAFAQAPQSATVDGTTGAIQIDGAAIDNTYQPEPQKGEESWLSGTVNPIAQATGRILNTSTDPLPCYGSYAAPTNIEGAQTLNNNLIQVNFVAGGAPGAPDVGMIMEDVALQTPDTHLVYKVPAANVGNTAALAQQAAPNRANYIGFRDNFIGLMYYNSNGNLGVLAGQASQLNAVVDLQDRNTELSYQLMLDNLYDRSRYFSIWNQAVDSYDPDVRIIENHGVEDELPNYCFPISGIVPGTTSTRVTRNGGNWEATANNDPAYVNKGNLDCMEINLAANLWRGFLYSNVALYLPDDLKFTPPNVTLPNNTNTYAYMNGRVPAAGLVDTYVNIGARWSLDVMDNVNPFNHHRNAGLRYRSQLLGNGRYCHFHIQVPQKFFAIKNLLLLPGTYTYEWSFRKDVNMVLQSTLGNDLRVDGASITIESVNLYASFFPMAHNTASTLEAMLRNDTNDQSFIDYLSSANMLYPIPANATNLPISIPSRNWAAFRGWSFTRIKQKETPALGSPFDPYFTYSGTIPYLDGTFYLNHTFRRVSIQFDSSVQWPGNDRLLTPNEFEIKRLVDGEGYNVAQSNMTKDWFLVQMLANYNIGYQGYHLPDGYKDRTYSFLRNFQPMTRQIVDQTNVPAYQNVPITHQHNNSGFTGFASPALPREGHPYPANWPYPLISATAVATQTQRKFLCDRTLWRIPFSSNFMSMGSLTDLGQNLLYANAAHALDMTFEVDAMDEPTLLYVLFEVFDVVRVHQPHRGVIETVYLRTPFSAGNAT

SEQ ID NO: 44 - protein, 910 aa, Ovine adenovirus 2
MATPSMMPQWSYMHIAGQDASEYLSPGLVQFAQATESYFKLGNKFRNPTVAPTHDVTTERSQRLQLRFVPVDREDTQYTYKTRFQLAVGDNRVLDMGSTYFDIRGTLDRGPSFKPYSGTAYNCLAPKASVNNTLFIATTGAKPQAIAQASFEATVNDNTGAIELDGQQINLSYQPSPQLGEESWLGDDFNPIKEGTGRILDVNTKPLPCYGSYAPPTNINGGQGLAEPTTINFKTGNAPDIPDTGFALENVALQAPDTHLVYKVANDKSGKTAALGQQAAPNRPNYIGFRDNFIGLMYYNSNGNLGVLAGQASQLNAVVDLQDRNTELSYQLMLDSLYDRSRYFSMWNQAIDSYDPDVRIIENHGVEDEMPNYCFPISGIKLEETSMRVVRNPGNNGWIGDNDANGNNYINIGNMDCMEINLSANLWKGFLYSNIALYLPDDYKFTPANVTLPENTNTYEYLNGRIPAGGLVDTYVNIGARWSLDVMDTVNPFNHHRNAGLRYRSQLLGNGRYCQFHIQVPQKFFALKNLLLLPGTYTYEWSFRKDVNMILQSTLGNDLRVDGASITIDSVNLYASFFPMAHNTASTLEAMLRNDTNDQSFIDYLSSANMLYPIPAKATNIPITIPSRNWAAFRGWSFTRIKQKETPALGSPFDPYFTYSGTIPYLDGTFYLSHTFKRVSIQFDSSVQWPGNDRLLTPNEFEIKRVVDGEGYGVAQSNMTKDWFLVQMLANYNIGYQGYHLPDGYKDRTYSFLRNFQPMCRQMVDSTRYQACQEVTISNQHNNSGFTAFANASLPREGHPYPANWPYPLIGENVAPCTTQKKFLCDKTLWRIPFSSNFMSMGSLTDLGQNLLYANAAHALDMTFEVDAMDEPTLLYVLFEVFDVVRVHQPHRGVIETVYLRTPFSAGNAT

SEQ ID NO: 45 - protein, 909 aa, Ovine adenovirus 3
MATPSMMPQWSYMHIAGQDASEYLSPGLVQFAQATESYFKLGNKFRNPTVAPTHDVTTERSQRLQLRFVPVDREDTQYTYKTRFQLAVGDNRVLDMGSTYFDIRGTLDRGPSFKPYSGTAYNCLAPKASVNNTLIISNDANKPQAIGQASYDCEINDDTGAIEIGGQNPTDLAYQPNPQIGQETWVFDNFGKMTQGAGRMLNTDTKPLPCYGSYAPPTNVNGGQGLAQPTTINFASGDQADTPDTGFALENVNLQAPDTHLVYKVAADKVGKTAALGQQAAPNRPNYIAFRDNFIGLMYYNSNGNLGVLAGQASQLNAVVDLQDRNTELSYQLMLDSLHDRSRYFSMWNQAIDSYDTDVRIMENHGVEDEMPNYCFPVSGIQTLSTATKVKKGAADWETDTDANGVNYITLGNLNCMEINLSANLWKGFLYSNIALYLPDEFKFTPENVDLPENKNTYAYMNGRLPAGGLIDTYVNIGARWSPDVMDVVNPFNHHRNAGLRYRSQLLGNGRYCQFHIQVPQKFFALKNLLLLPGTYTYEWSFRKDVNMILQSTLGNDLRVDGASINIDSVNLYASFFPMAHNTASTLEAMLRNDTNDQSFIEYLSSANMLYPIPAKATNIPITIPSRNWAAFRGWSFTRLKQKETPALGSPFDPYFTYSGTIPYLDGTFYLSHTFKRVSIQFDSSVQWPGNDRLLTPNEFEIKRAVDGEGYSVAQSNMTKDWFLVQMLANYNIGYQGYHLPDGYKDRTYSFLRNFQPMCRQIVDSTRYDAYKEVTISNQHNNSGFTAFANSSLPGEGHPYPANWPYPLIGENVAPCTTQKKFLCDRTLWRIPFSSNFMSMGSLTDLGQNLLYANAAHALDMTFEVDAMDEPTLLYVLFEVFDVVRVHQPHRGVIETVYLRTPFSAGNAT

SEQ ID NO: 46 - protein, 910 aa, Bovine adenovirus 2
MATPSMMPQWSYMHIAGQDASEYLSPGLVQFAQATESYFKLGNKFRNPTVAPTHDVTTERSQRLQLRFVPVDREDTQYTYKTRFQLAVGDNRVLDMGSTYFDIRGTLDRGPSFKPYSGTAYNCLAPKASVNNTLIISNDANKPQAIGQASYDCAINDDTGAIEIGGPNPTDLAYQPNPQIGQETWVFDNFGKMTQGAGRMLNTDTKPLPCYGSYAPPTNVNGGQGLAQPTTINFVSGDQADTPDTGFALENVNLQAPDTHLVYKVAADKVGKTAALGQQAAPNRPNYIAFRDNFIGLMYYNSNGNLGVLAGQASQLNAVVDLQDRNTELSYQLMLDSLHDRSRYFSMWNQAIDSYDTDVRIMENHGVEDEMPNYCFPVSGIQTLSKATKVKKGVANWETDTDANGVNYITLGNLNCMEINLSANLWKGFLYSNIALYLPDEFKFTPENVDLPENKNTYAYMNGRLPAGGLIDTYVNIGARWSPDVNGRCKPIYHHRNAGLRYRSQLLGNGRYCQFHIQVPQKFFALKNLLLLPGTYTYEWSFRKDVNMILQSTLGNDLRVDGASIKIDSVNLYASFFPMAHNTASTLEAMLRNDTNDQSFIEYLSSANMLYPIPAKATNIPITIPSRNWAAFRGWSFTRLKQKETPALGSPFDPYFTYSGTIPYLDGTFYLSHTFKRVSIQFDSSVQWPGNDRLLTPNEFEIKRAVDGEGYSVAQSNMTKDWFLVQMLANYNIGYQGYHLPDGYKDRTYSFLRNFQPMCRQIVDATRYNDYKEVTISNQHNNSGFTAFANASLPREGHPYPANWPYPLIGENVAPCATQKKFLCDRTLWRIPFSSNFMSMGSFTDLGQNLLYANAAHALDMTFEVDAMDEPTLLYVLFEVFDVVRVHQPHRGVIETVYLRTPFSAGNATT

SEQ ID NO: 47 - protein, 920 aa, Alpaca adenovirus CA/2007
MATPSMMPQWSYMHIAGQDASEYLSPGLVQFAQATETYFKLGNKFRNPTVAPTHDVTTERSQRLQLRFVPVDKEDTQYTYKTRFQLAVGDNRLLDMGSSYFDIRGRLDRGPSFKPYSGTAYNSLAPKSSVNNCGFTSAADLPQYIAQASFINDINTNTGEMQVGENDQGQPVYADKTYQPEPQIGNQSWSQGPQNTLLADIEGAGRALKPTTPRNPCYGSYAAPTNENGAQATGEVDLVFLTQGNTAGPPTSVLYTEDVALTAPDTHFVYKVADDDLATAPGLGQQAAPNRPNYIGFRDNFIGLMYYNSNGNLGVLAGQASQLNAVVDLQDRNTELSYQLMLDNLYDRSRYFSIWNQAIDSYDQDVRVLENHGVEDELPNYCFPLSGVLYTTPTSMQVVRGADQNDGWIANNAGSGINYINNGNLDCMEINLAANLWRGFLYSNIALYLPDNLKFTPNNVILSNNPNTYNYMNGRIPAAGLVDSFVNIGARWSPDVMDSVNPFNHHRNAGLRYRSQLLGNGRYCSFHIQVPQKFFAIRNLLLLPGTYTYEWSFRKDVNMILQSTLGNDLRVDGASIIIDSVNLYASFFPMAHNTASTLEAMLRNDTNDQSFIDYLSAANMLYPIPAGATNIPISIPSRNWAAFRGWSFTRIKQKETPALGSAYDPYFTYSGTIPYLDGTFYLNHTFRRLAIQFDSSVSWPGNDRLLTPNEFEIKRVVDGEGYNVAQSNMSKDWFLIQMLTNYNIGYQGFYLPEGFRDRTYSFLRNFQPMCRQVVDTDNFADYKPVQLQHQHNNSGFTGFAAASAAREGHPYPANWPYPLIGENAVRTTTQKKFLCDRTLWSIPFSSNFMSMGSLTDLGQNLLYANAAHALDMTFEVDALDEATLLYVLFQVFDVCRVHQPHRGVIEVVYLRTPFSAGNAT

SEQ ID NO: 48 - protein, 909 aa, Murine adenovirus 1
MTTPSMQPQWAFMHIAGQDASQYLSPGVVQFAAATDTYFSLGNKFRNPTVAPTHDVTTDRSQRLTLRIVPVDREDSQYTYKTRFQLSVGDNRVLDMASTYFDIRGRLDRGPSFKPYSGTAYNSLAPRAAPNNLMFKTGADSKTMTIAQANIVGSTIDQDGLKINNVALNPNAGEPAVQEGLENWMEELQIGADKKFASRVLKADQPVLPNYGSYAYPTNINGTQTKDGTTVDKVYMCSKGANVQNPDVVLYSEEVNLQAPDTHLLDGPGADNPKDRVAFCAAPNRPNYIGFRDNFIGLMYYNSNGNQGVLAGQASQLNAVVDLQDRNTELSYQFLLDSLYDRSRYFSLWNQAIDSYDPRVRIIENDGVEDDITSFAFDLRGIGDLPYKQVQTHNGNQQSANTTDTCYIGKGNMAAMEINIPANLWLGFLYANVAQYMPDDFKVDPSNIQMPQDKTTYAYMNQRIAPAGLIETYVNVGGRWSVDFMDTVNPFNHHRNEGLKYRSQILGNGRFVDFHIQVPQKFFAIKSLLLLPGSYTYEWSFRKDVNMVLQSSLGNDLRADGARLEIHSVNLYASFFPMAHNTASTLEAMLRNETNDQTFLDYLSSATMMFPIPAGQTQVPVSIPARNWAAFRGWSFTRIKQQETPNIGSPYDPYFKYSGSIPFLDATFYLTHTFQRVSIMFDSSVSWPGNDRLLTPNEFEIKRHIDAEGLCVGQSNMTKDWFLVQMLSNYNIGYQGFYLPENNKDRTYSFVRNFEPLARQVVDDAAAANYRDVPLSKRFNNSGWRSAGPPIFAREGAPYPANWPYPLCGEAAWAAKTQRKFLVDRYMYRIPFSSNFMSMGALTDLGQNLLYANSAHSLEMTFNVDPMQEATFLYILFEVFDCVRIHQPHRGIIEAVYLRSPFSAGNATT

SEQ ID NO: 49 - protein, 909 aa, Murine adenovirus 3
MTTPSMQPQWAFMHIAGQDASQYLSPGVMQFAAATETYFSLGNKFRNPTVAPTHDVTTDRSQRLTLRIVPVDREDSQYTYKTRFQLSVGDNRVLDMASTYFDIRGRLDRGPSFKPYSGTAYNSLAPRAAPNNLMYQVGGNNPKTKTIAQANIPGTQIDANGLQVNNQNLDIQRGEPEVQVGYQNWMDELEPGNQPKYAGRVLKTNQPVLPNYGSYAFPTNENGTQTKNGTQVDKVFMLPKVNAQNADVVLYSEEVNLQAPDTHLLEGPSAATATNRVAIQAAPNRPNYIGFRDNFIGLMYYNSNGNQGVLAGQASQLNAVVDLQDRNTELSYQFLLDSLYDRSRYFSLWNQAIDSYDPRVRIIENDGVEDDITSFAFDLRGVGRLEYKQVQTHQGNQQANNADDTSYIGKGNMAAMEINIPANMWIGFLYANVAQYVPDAYKVDPTNIAMPENKNTYSYMNQRIAPTGLVETYVNMGGRWSVDFMDTVNPFNHHRNDGLKYRSQVLGNGRYVDFHIQVPQKFFAIKNLLLLPGSYTYEWSFRKDVNMVLQSTLGNDLRADGASLEIHSVNLYASFFPMAHNTASTLEAMLRNETNDQTFLEYLSSATMMFPIPAGQTQIPVSIPARNWAAFRGWSFTRLKQSETPNIGSPFDPYFTYSGSIPFLDATFYLTHTFQRVSIMFDSSVSWPGNDRLLTPNEFEIKRNIDGEGLCVAQSNMTKDWFLVQMLANYNIGYQGYHLPDNNKDRTYSFLRNFEPMTRQVVDRQLDGRYVDVMLTKRFNNSGWKSASAPIFPREGAPYPANWPYPLCGEMAWATRTQRKFLVDRYMYRIPFSSNFMSMGALTDLGQNLLYANSAHSLEMTFEVDPMTEATYLYILFEVFDCVRIHQPHRGIIEAVYLRTPFSAGNATT

SEQ ID NO: 50 - protein, 910 aa, Bovine adenovirus 4
MEPQREFFHIAGRNAREYLSENLVQFITATQSFFNLGEKFRDPFVAPTSGVTTDRSQKLQLRIVPIQVEDNENFFKARFTLNVGDNRIADLGSAFFDIEGFIDRGPSFKPYGGTAYNPLAPKSALPNMAFKNNEETTYIAQLPQIYAAEDKGLETSQLVFLFPATKPNPQEGRSDEGIIMALMILDTKKFGAYGRLIGADSQGKIFPAYGSYVKPVSVEGSVSTADVQRVYLNTTDVNDRVSGVLAVDTVQRLNPDCHYAEYTNEVKITSSGNRPNYIGFRDNFVGLMYYNNGSNAGTFPSQTQQLNVVLDLNDRNSELSYQYLIAEISSRYKHFALWNQAVDTYDENVRIIHNEGYEEGPPVLSFPPFGIQNFFSDTDEGTAMTIQEGNQQAQKLTIQSLWLWNIPTLEMNLAANLQRTFLWANVAMYLPDNLKRTPPNVDLPANKNTYGYMNGRIPYPNVIDTWTNIGARWSLDIMDTINPFNHHRNTGLKYRSQLLGNGRFSRFHIQVPQKFFAIKNLLLLPGTYNYEWYFRKDPNMIFQSSIGNDLRADGAYINYSNINLYVSFFPMNYDTVSELELMLRNATNDQNFADYLGAVNNLYQIPPNTSTVVVNVPDRSWGAFRGWSFNRVKASETPMIGATKDPNFLYSGSIPYLDGTFYLTHTFQRVSIQWDSSVPWPGDDRLLIPNWFEIKRDYSIDAEATNMSQCNITKDWYMIQMAANYNQAYQGYKLPISHKYYGFLENFQPMSRQVPIYGGDLYDLYTEYIKNPNLMQIWNNCGLQQKTSGIPLLENSGHLYVANWPYPLIGKHAIESQKLQKFLCDKYMWQIPFSSNFLNMGNLTDLGQNVLYANASHSLNMVFTVDPMQETTYLMLLFGVFDQVVINQPTRSGISVAYLRLPFSAGSATT

SEQ ID NO: 51 - protein, 903 aa, Odocoileus adenovirus 1
MEPQREFFHIAGRNAREYLSENLVQFITATQSFFNLGEKFRDPFVAPSSGVTTDRSQKLQLRIVPIQTEDNENFYKARFTLNVGDNRVADLGSAYFDIEGTLDRGPSFKPYGGTAYNPLAPKSAMPNITVTKGGDTIYIAQLPQTYAANDKGVPEAIAVQTTAIKPNPQSGQTEDFAGVDKVDPTTTGGQGRILSATSVGDVFPAYGSYAPPQSVTGDISTEAVTRVYLNTTTTEDRVSGITAVDKAIRKHPDAHFVEFVEDGKATSSGNRPNYIGFRDNFIGIMFYNNGSNAGTLSSQTQQLNVVLDLNDRNSELSYQYLLADISNRYKYFALWNQAVDNYDEYVRILHNEGYEEGPPVLSFPPNGVQNYFTPPAKGNAMTVDTGRNTAAKTDNTKAFIGYGNIPSLEMNLSANLQRTFLWANVAMYLPDKYKKTPNNVDLPANTNSYGYINGRIPIPNVIDTWTNIGARWSLDVMDNVNPFNHHRNNGLKYRSQLLGNGRYCKFHIQVPQKFFAIRNLLLLPGTYNYEWYFRKDPNIVLQSSIGNDLRADGAIITYTSINLYVSFFPMNYETVSELELMLRNATNDQNFADFLGAVNNLYQIPANTNTIVVNIPDRSWGAFRGWSFNRIKATETPMIGATKDPNFNYSGSIPYLDGTFYLTHTFQRVSIQWDSSVPWPGDDRLLIPNWFEIKREPNYDPEGYNISQSTLTKDFFMVQMAANYNQAYQGYKLPSTYKHYGFIENFEPMSRQVPVYGDDVFDLYNAYLQDPTNMQIWNNCGLQQKTTNISLLENSGHLYVANWPYPLVGRDAVENQTTEKKFLCDKYMWQIPFSSNFLNMGNLTDLGQNVLYANSSHSLNMVFTVDSMPENTYLMLLFGVFDQVVVNQPTRSGISVAYLRLPF

SEQ ID NO: 52 - protein, 902 aa, Goat adenovirus 1
PQRDFFHIAGRNAREYLSENLVQFISATQSFFNLGEKFRDPFVAPSTGVTTDRSQKLQLRIVPIQTEDNENFYKTRFTLNVGDNRVADLGSAYFDIEGVIDRGPTFKPYGGTAYNPLAPKSAFPNAAFMDNDEATTVYIAQLPNAYKAQNKGVEEAIRVEANTTTPNPQSGDYATYDTAKFNPETTGASGRLLSINSLGDLFPAYGSYCRPQSADGNISTAPITKVYLNTTATDDRVSGVTAVDTATRLHPDAHYIEYTDEAKATAIGNRPNYIGFRDNFIGLMFYNNGSNAGTFSSQTQQLNVVLDLNDRNSELSYQYLIADLTDRYRYFALWNQAVDSYDSHVRILHNEGYEEGPPALSFPSQGIQNYFMPTAAGNAMTVDTGRNTAAKTDNTKAFIGYGNIPSLEMNLTANLQRTFLWSNVAMYLPDRLKTTPPNINLPEDTNSYGYMNGRVPLANIIDTWTNIGARWSLDVMDTVNPFNHHRNSGLKYRSQLLGNGRYCRFHIQVPQKFFAIKNLLLLPGTYNYEWYFRKDPNMVFQSTLGNDLRADGATITYTNINLYVSFFPMNYETVSELELMLRNATNDQNFADYLGAVTNLYQIPANTNTVVVNVPDRSWGAFRGWSFNRVKASETPMIGATKDPNFTYSGSIPLLDGTFYLTHTFQRVSIQWDSSVPWPGDDRLLVPNWFEIKRDPNMDAEGYTMSQSTITKDFYLVQMAANYNQAYQGYKMPIHSKYYGFLENFQPMSRQVPIYGNGTYDLYTAYVTNQRTMQIWNNSGLESKTSNPPILSNTGHLYVANWPYPLIGPNAIENQQTERKFLCDKYMWQIPFSSNFLNMGNLTDLGQSVLYTNSSHSLNMVFTVDSMPETTYLMLLFGVFDQVVINQPTRSGISVAYLRLPF

SEQ ID NO: 53 - protein, 907 aa, Possum adenovirus
MEPQREFFHIAGRNAREYLSENLVQFISATQTFFNLGDKFRDPFVAPSSGVTTDRSQKLQLRIVPIQTEDNESFYKARFTLNIGDNRVADLGSAYFDIEGILDRGPSFKPYGGTAYNPLAPKSALPNTAVTEGTTLKYYAQLPQLYSITDNGVNASTQQTVSSVIPDPQLGQYNYDEIDDADYTQKGGIGRVIGNDSTGDAYTAHGLYALPQSEQGNISTATIERVYVNSRVTNNAISGVMAVDTIERLHPDSHIVDYQDDAQVTTAGDRINYIGFRDNFIGLMYYNTGSNTGVFSSQTQQLNIVLDLNDRNSELSYQYLIADITDRYRYFALWNQAVDSYDPFVRVIENDGYEEGPPCFTFPLNGMQNPFSSPDSSTVVTNTGATAAGTGYIAYGNIPSMEMNLTANLQRTFLWANVAMYLPDRLKSSPANVDLPTNTQSYGYINSRIPLPNIIDTWTNIGAKWSLDVMDNINPFNHHRNMGLKYRSQLLGNGRYCKFRIQVPQKFFAIKNLLLLPGTYNYEWFFRKDPNMILQSTLGNDLRYDGASITYTAVNLYISFFPMNYDTVSELELMLRNSTNDQNFSDYLGAVNNLYQIPANTSTVVVNIPDRSWGAFRGWSFNRVKATETPMIGSTRDPNFTYSGTIPILDGTFYLSHTFQKVSIQWDSSVPWPGDDRMLIPNWFEVKRDTNSDPEGYCMSQTSITKDWYFVQMAASYNQGYQGYRLPSTNRYYGFIENFQPMSRQIPEYSTTDGLYDLYSYYVANPDSLPIWNNCGLQPPTAPPYNPMMRNAGHLYATNWPYPLTGKNAVSKQVTEKKFLCDKYMWQIPFSSNFLNMGNLTDLGQNVLYANSSHSLNMIFSVDAMDEPTYLFLLFGVFDQVVINQPTRSGISVAYMRLPFAAGSAAS

SEQ ID NO: 54 - protein, 910 aa, Duck adenovirus
MEPQREFFHIAGRNAKEYLSENLVQFITATQNYFNLGDKFRDPYVAPTNGVTTDRSQKLHLRIVPIQTEDNDSFFKARFTLNVGDNRIVDMGSSYFDIQGILDRGPSFKPYRGTAYNPLAPTSGMPNMAYTHSNNTTYIGQLPQIYSVTDKGVTEAKQQQIQSTDPNPQVGQSYGAGGPDDVDTEKSGGKGRLVVGTAGDSQVTGFPAYGSWCPPQSVTGDINTTLNPSTVYLNTTTDTDRVTGLVAGDTVEWNAPDAHYVNYVSDMQCSAAGNRPNYIGFRDNFIGIMYYNSGSNAGSFSSQTQQLNVVLDLNDRNSELSFQYLIAELTDRYKHFALWNQAVDSYDKFVRVIENDGYEEGPPSLSFPPHGFMNFFTAPDTGTAMTVSDDTATKTANTTAIFGYGNLPSMEINLTANLQRTFLWSNVAMYLPDYLKTTPPGVTLPANPNSYAYMNGRLPLPNIIDTWTNIGARWSLDVMDEINPFNHHRNLGLKYRSQLLGNGRYCKFHIQVPQKFFALRNLLLLSGTYNYEWYFRKDPNMILQSTLGNDLRADGASVTYTSINLYVAFFPLAYDTVSELELMLRNATNDQNFSDYLGAVNNLYQIPANSTSVVVNVPDRSWGAFRGWSFTRIKARETPAIGATKDPNFTYSGSIPLLDGTFYLSHTFNRVSIQWDSSVPWPGNDRLLTPNWFEIKRNVNADPEGYTMSQSSITKDWFMVQMAANYNQAYQGYSLPHTKFYDFLSNFEPMTRQIPDYSKYFDLYTQYLQDPKKMPIWNNSGVQQMTNSPALLENTGHLYMANWPYPLIGTAAVESQITESKFLCDRYMWMIPFSSNFLNMGTLTDLGQNVLYANSSHSLNMVFDVDPMAETTYLLLLFGVFDQVVINQPTRSGISVAYLRLPFAAGSAAT

SEQ ID NO: 55 - protein, 909 aa, Snake adenovirus
MEPQREFFHIAGRSAKEYLSENLVQFIQATQNYFNIGEKFRDPYVAPSAGVTTDRSQKLQLRVVPMQIEDNANYYKARFTLNVGDNRLVDLGSSYFDIKGTLDRGPSFKPYGGTAYNPLAPKSAPVNSPFIVGNDTHVVAQLPQTYAAANTGVTEAIQQQVSNVQPNPQDGLPNYSGPEVVDATTKAGLGRVVAEESEGQQFPCLRAYAAPQTAAGDVSTAPIEKTYVNTTNVAGRVSGTMATDVIDWQNPDAHFVDYVDDGRSTSAGNRPNYIGFRDNFIGIMYYNSGSNTGSLSSQTQQLNVVLDLNDRNSELSYQYMLADLTSRWHYFALWNQAVDSYDRHVRIIENDGYEEGPPNLSFPIQGIQNPFSPSSVGTEMTVNTANQTAAATANTVAHIGYGNIPAVEMNLPANLRRTFLYANVAMYLPDTYKFTPPNIDLPANHLSYGYMNGRLPLPNIIDTWTDIGARWSLDVMDTVNPFNHHRNTGLKYRSQLLGNGRHCNFHIQVPQKFFAIKNLLLLPGTYNYEWYFRKDPNMVLQSTLGNDLREDGAQITYNQVNLYVSFFPMNYDTQSELELMLRNATNDQNFSDYLGAVNNLYQIPAGSNTVVVNIPDRSWGAFRGWSFTRLKVTETPRIGATQDPNFEYSGTIPYLDGTFYLSHTFQRCSIQWDSSVPWPGNDRLLVPNWFEIKDPPNQDPEGYNTMQSNLTKDFFFTQMAASYNQGYQGFSYPSCTKHYGFINNFEPMSRQVPVYDATHPNLMAAYLNNPATMPIWNNCGFQQKTSTNALLERCGHAYVANWPFPLTGRDALPNQTTEKKFLVDNYLWQIPFSSNFLNMGTLTDLGQNVMYANSSHSLNMQFTVDPMNEPTYLLLLFGVFDQVVVNQPTRSGISVAYLRLPFASGSAAT

SEQ ID NO: 56 - protein, 906 aa, Turkey adenovirus 3
MDISNATPKLDIFHIAGPDASEYLSENLVNFISSTESYFPINKKFRETIVAPTKGVTTEQSQKLQVKIVPTLTQDLENSFTARFTIAVGDGRVLDMGSTYFDIRGNIDRGPSFKPYGGTAYNPLAPRSAQFNNIKTVGGKTYLTAQATKFFSTSGNGCAAANTEASSFTNLVPSPNTGSAESSFDPTTEGASCRAITLGSSVTDATCYGAYTPIQNANGSILPPSVTPDKKFADAGKSGSVTCTAAICCDNVTVQYPDTRIVAYDSTDKIATRMGNRINYIGFRDNFIGLMYYDNGAHSGSLATETGDINLVEQLQDRNTEISYQYMLADLMSRNHYYSQWNQPVDDYDLNVRVLTNIGYEEGPPGYCYPSTGMGNYPNTVMSVGTLVDNNGTTATTTSNTVAVMGFGSVPTMEINVQAYLQKCWMYANIAEYLPDKYKKAIQGTSETDPTTYSYMNSRLPNVNMADLFTHIGGRYSLDVMDNVNPFNHHRNRGLQYRSQILGNGRNVRFHIQVPQKFFAIKNLLLLPGTYSYEWWFRKDPNLVLQSTLGNDLRKDGASIQLAVISLYASFFPMDHATCSELILMLRNDQNDQTFMDYMGAKNNLYLVPANQTNVQIEIPSRAWTAFRGWSFNRIKTAETPAVWSTYDLNFKYSGSIPYLDGTFYLSHTFNSMSILFDSAITWPGNDRMLVPNFFEIKREIDTEGYTTSQSNMTKDWYLIQMSANYNQGYHGYSFPADKVYRQYDFMSNFDSMSVQVPRSGLAFLFNENYNLIVNNSGFLPSRTAPIAGVNEGHPYPANWPAPLIGNSPDSVVTVRKFLCDKYLWTIPFSSNFMNMGELTDLGQSLLYTESAHSLQITFNVDPMPEPTYIYLLYSVFDCVRVNQPNKNYLSAAYFRTPFATGTASV

SEQ ID NO: 57 - protein, 906 aa, Turkey adenovirus A
MDISNATPKLDIFHIAGPDASEYLSENLVNFISSTESYFPINKKFRETIVAPTKGVTTEQSQKLQVKIVPTLTQDLENSFTARFTIAVGDGRVLDMGSTYFDIRGNIDRGPSFKPYGGTAYNPLAPRSAQFNNIKTVGGKTYLTAQATKFFSTSGNGCAAANTEASSFTNLVPSPNTGSAESSFDPTTEGASCRAITLGSSVTDATCYGAYTPIQNANGSILPPSVTPDKKFADAGKSGSVTCTAAICCDNVTVQYPDTRIVAYDSTDKIATRMGNRINYIGFRDNFIGLMYYDNGAHSGSLATETGDINLVEQLQDRNTEISYQYMLADLMSRNHYYSQWNQAVDDYDLNVRVLTNIGYEEGPPGYCYPSTGMGNYPNTVMSVGTLVDNNGTTATTTSNTVAVMGFGSVPTMEINVQAYLQKCWMYANIAEYLPDKYKKAIQGTSETDPTTYSYMNSRLPNVNMADLFTHIGGRYSLDVMDNVNPFNHHRNRGLQYRSQILGNGRNVRFHIQVPQKFFAIKNLLLLPGTYSYEWWFRKDPNLVLQSTLGNDLRKDGASIQFSSISLYASFFPMDHATCSELILMLRNDQNDQTFMDYMGAKNNLYLVPANQTNVQIEIPSRAWTAFRGWSFNRIKTAETPAVWSTYDLNFKYSGSIPYLDGTFYLSHTFNSMSILFDSAITWPGNDRMLVPNFFEIKREIDTEGYTTSQSNMTKDWYLIQMSANYNQGYHGYSFPADKVYRQYDFMSNFDSMSVQVPRSGLAFLFNENYNLIVNNSGFLPSRTAPIAGVNEGHPYPANWPAPLIGNSPDSVVTVRKFLCDKYLWTIPFSSNFMNMGELTDLGQSLLYTESAHSLQITFNVDPMPEPTYIYLLYSVFDCVRVNQPNKNYLSAAYFRTPFATGTASV

SEQ ID NO: 58 - protein, 912 aa, Raptor adenovirus A
MDISNATPKLDIFHIAGQDASEYLSENLVDFITNTETYFPINKKFRETIVAPTKNVTTEQSQRLQVRIVPTLTQDLENSFTARFTIAVGDGRVLDMGSTYFDIRGRLDRGPSFKPYCGTAYNPLAPRSAQYNNIRKVGNTTVLTAQASNLYTIASSQNGAAAANTVANDFSNIVPSPNTGITESTVDNTTQGGSGRAVILPDEFPETTAYGAYASPTSVDGGQLPASKAIQKKYADAGKSGNVKVTSAFAGEELNVIYPDTRIVAYDNTAKLATRMGSRPNFIGFRDNFIGIMYYDNGAHSGSLATETGDINLVEQLQDRNTELSYQWLLNDLMSRQHYFTQWNQAVDDYDLNVRVLCNTGYEEGPPGQVYPITGMGNYPANVLKVGKMVTNTGSDANTVSNTLSIVGFGSVPAWEMNMQAQLQRSWLYSNIAEYLPDTLKYSAPLALDEDPTTYNYMNTRLPNVNVVDLFTNIGGRYSLDIMDNQNPFNHHKNRGLQYRSQILGNGRVCDFHIQVPQKFFAIKNLLLLPGTYTYEWWFRKDPNLVLQSTLGNDLRKDGAVIEYTNINLYASFFPMDHATCSELILMLRNDQNDQTFMDYLGAKNNLYVVPPDVSNLQIEIPSRSWTAFRGWSFNRMKASETPAVWSTYDVNFHYSGSIPYLDSTFYLSHTFNSLAITFDSAVPWPGNDRLLLPNFFEIKRNYDSEGYCTSQSNMTKDWWLIQMSANYNQGYHGYSYPADKTYRQYDFISNFDPMSIQVPANSINLISPSVQSSSKNAIWNNSGYVAPRDKTLATPNQGHPYPANWPAPLIGDYNVSMRTVRKFLCDKYLWTIPFSSNFMNMGELTDLGQSLLYTESAHSLQISFNLDPMPETTYVYMLYSVFDCVRVNQPNKNYVSAAYFRTPFATGTASA

SEQ ID NO: 59 - protein, 901 aa, Great tit adenovirus 1
MDISNGTPKLDIFHIAGQDASEYLSENLVDFITNTESYFPINKKFRETIVAPTKNVTTEQSQRLQVRIVPTLTQDLEHSYTARFTVAVGDGRVLDMGSPYFDIRGTIDRGPSFKPYQGTAFNPLAPRSAMFNNIRKIDNTTILTAQASHYYDVSSGNGCAEAQNEANRFSGIVPSPNVGLSESTMDHRSSGASGRVVLLADNKEATAYGAFAPAKQLNGSQLGVGTAIQPRFTNAGKEGNLTCTGAFAGEEIEVYYPDTRIVMWDDDTKIAVRMGKRPNYIGFRDNFIGLMYYDNGALSGSLATETGDINLVEQLQDRNTEISYQYMLADLMSRQHYYTQWNQAVDDYELGIRVLTNTGYEEGPPSFSFPSLGMGNYPYLGLDGGIMVENNGAAATDIANTAAGIGFGSVPSMELNLHAYIQRSWMYSNIAEYLPDNLKYDVPGLPPVPAANTYNYLNARLPHVNVVDLFTHLGGRYSLDVMDNQNPFNHHKNRGLQYRSQILGNARKVDFHIQVPQKFFAIKSLLLTPGTYTYEWWFRKDPNLVLQSTLGNDLRADGASVQFTSITLFASFFPMDHATASELILMLRNDTNDQTFMDYMGAKNNLYVVPPNTSNLQVEIPSRAWTGFRGWSFNRIKAQETPAIWSTYDVNFKYSGSIPFLDSTFYLGHTFNSVSITFDSAIPWPGNDRLLLPNYFQIQRRGPDAEGYCTCQSTMTKDWYLIQMLGNYNQGFHGYSFPVDKTFRQYDFIANFDPMCLQLPQNILDLSPIIVSNPDVVRNNSGYVAPRSSSIALRNEGHPYPANWPYPLIGEDVGGTSVGTRTVRKFLCDKYLWNIPFSSNFMNMGELTDLGQSLLYTESAHSLQLSFELEPMSDVTYVYLLFNVFDCVRVNQPNKNYVSAA

SEQ ID NO: 60 - protein, 920 aa, Frog adenovirus 1
MDIYNGTPKLDIFHIAGRDASEYLSENLIDFMSSTESYFSINKKFRETIVAPTKGVTSEQSQRLQVRIIPVQTQDAEQTYTARFTIAVGEGRVLDMGSTYFDIRGIVDRGPSFKPYSGTAYNSLAPKSAVFNNVKTVSIGGTNTSVLTAQAPHLYSINTGDNGCTAATTTAATFSGTVPNPGGGDIEQTFSSNEGGAGRVVNAQQDTGVYGAYAQPVNEAGNQNTAAVTSKFTNAGKGGNVTCTSAFAVETVGLTYPDTRVVAYDDDTGDVTRLGNRINYIGFRDNFVGLMYYDNGAHSGTLATETGDINIVEPLQDRNTEISYQYMLADLMSRHHYFAMWNQAVDDYELGVRVLSNHGYEEAMPALSFNTTGMGNYGGAALLSGQQVTINSNAATAVANSKALIGFGAVPSMEMNLGAQLARSWLFANVAEYMPDDLKVSVNVPQRYPQPGTNTSSYNYKNLRLPNVNLIDLFTQIGGRYSLSFMDNVNPFNHHKNRGLKYRSELLGNGRIAKFHIQVPQKFFAIKKLLLLPGTYTYEWWFRKDPNMVLQSSLGNDLRLDGATIQYTSINLFASFFPMDHATCNDLILMLRNETNDQSFMDYMGGKNNLYVVPPNTENLQIEIPSRTWEAFRGWSFNRLKTAETPSVWSTYDVNFKYSGSIPYLDGSFYLSHTFKNIAINFDSAVPWPGNDRMLVPNYFEIKRTGPDSEGYCVAQSNMTKDWFLVQMSGNYNQGYHGYSFPVDKTYRQYDFISNFDPMSIQMPDYTQQNIYDLLTAATSATGRDIIRNNTGFTANRLNPSVSDHTGHPYPCNWPYPLIGSQAVASVTHRKFLCDKYLWNIPFSSNFMNMGELTDLGQSLLYTNSSHSIQISIELEPMNETTYVYMIFGVFDAVRVNQPNKNSVSAAYFRTPFATGTASA

SEQ ID NO: 61 - protein, 944 aa, White sturgeon adenovirus
MDTLYKMTPVQTMHIMGPDASQYLSEGSKSLPPYGQKIFKLNNKFRDTVAAPLHVTTSESQRMAYMYSPQTIDNANQAYWSGRFQLPVPNNRILDMGGSFFDIEGTLDRGKSFKPYGGTAYNCLAPHSSTFNFIRGLVLNAQSGNAVAGLDAPLTASTDVQAAQTAMLTFSGSNPSPNVGLNYTPDPSGLLFGGRAVVLSEDATPTTPSYKDANAYGAYMTPLDIYGAVDDNVGKLYTCRAGVTDANNTARKITDLWACDNTQVSFPDTRVVSYNPDLMTTTRVGNRMNCVAFRDNFINMLYYDSTNTGVLESFANGNNVCLDSAQDRSTELGYQYWLAGVSSRYHNYDIFNQSIDSYDKRVRFFTNRGFDDGLPSYAYNTNARSGLTTGKMVDNTGAELVIQNNASIETQALVGNGKMTHYEINLKSQKFKNWIYTNISEYLPDKYKTPASVTGTNYPPFPTPGTDPTTYAYKNLMIPSQNIVDLFTNIGARYSIPQTDNVNPFNHHRNYGLNHRSMLLGNSRITNFAIQVPNKFFAIKNLALLPGNYNYEWKFRKDVNMVLQSTLGIDLRADEATIDYSRVKLYCPFFPFNHKDVAELDMLLRQQNNSQTFYDPLNSRSQFIEVPAGITNISVTVPAQSWSCFRGWKFNRLKASERCNKNAVYETGLKYSGTYPHIDGTYYLGHTFRALEIKWDTSVPWPGNDRLFSPNYFEMKRTLDNGFADNYCIAQCDMTKDWWLVQNSANYNQGYQGYQYPSSKTYFEYDFMRNFVPMSRQVPNMEPLKMDLQFGTATWALPYPGKSTFNNTIRNNSGFIAPRDAMPQTDARGAPYPANWPYPLISEKALPDGQIMTEKKFLCDKYLWNVPFSSNFFNMGELTDEGQSNMVVQSASNLQMNFNLDPMDEPTLIHILYGVFDCVQVSQPARNVISALYFRTPFNIGANA

SEQ ID NO: 62 - protein, 942 aa, Fowl adenovirus 1
MTALTPDLTTATPRLQYFHIAGPGTREYLSEDLQQFISATGSYFDLKNKFRQTVVAPTRNVTTEKAQRLQIRFYPIQTDDTPNSYRVRYSVNVGDSWVLDMGATYFDIKGVLDRGPSFKPYGGTAYNPLAPREAIFNTWVESTGPQTNVVGQMTNVYTNQTRNDKTATLQQVNSISGVVPNVNLGPGLSQLASRADVDNIGVVGRFAKVDSAGVKQAYGAYVKPVKDDGSQSLNQTAYWLMDNGGTNYLGALAVEDYTQTLSYPDTVLVTPPTAYQQVNSGTMRACRPNYIGFRDNFINLLYHDSGVCSGTLNSERSGMNVVVELQDRNTELSYQYMLADMMSRHHYFALWNQAVDQYDHDVRVFNNDGYEEGVPTYAFLPDGHGAGEDNGPDLSNVKIYTNGQQDKGNVVAGTVSTQLNFGTIPSYEIDIAAATRRNFIMSNIADYLPDKYKFSIRGFDPVTDNIDPTTYFYMNRRVPLTNVVDLFTNIGARWSVDQMDNVNPFNHHRNWGLKYRSQLLGNSRYCRFHIQVPQKYFAIKNLLLLPGTYTYEWVLRKDPNMILQSSLGNDLRADGAQIVYTEVNLMANFMPMDHNTSNQLELMLRNATNDQTFADYLGAKNALYNVPAGSTLLTINIPARTWEGMRGWSFTRLKASETPQLGAQYDVGFKYSGSIPYSDGTFYLSHTFRSMSVLFDTSINWPGNDRLLTPNLFEIKRPVATDSEGFTMSQCDMTKDWFLVQMATNYNYVYNGYRFWPDRHYFHYDFLRNFDPMSRQGPNFLDTTLYDLVSSTPVVNDTGSQPSQDNVRNNSGFIAPRSWPVWTAQQGEAWPANWPYPLIGNDAISSNQTVNYKKFLCDNYLWTVPFSSDFMYMGELTDLGQNPMYTNNSHSMVINFELDPMDENTYVYMLYGVFDTVRVNQPERNVLAMAYFRTPFATGNAV

SEQ ID NO: 63 - protein, 942 aa, Fowl adenovirus A; identical to SEQ ID NO: 62

SEQ ID NO: 64 - protein, 948 aa, Fowl adenovirus D
MAAFTPDLTTATPRLQYFHIAGPSTREYLSEDLQQFIAATGSYFELKNKFRQTVVAPTRNVTTEKAQRLQIRFYPTQTDDTPNSYRVRYSLNVGDSWVLDMGATYFDIKGVLDRGPSFKPYGGTAYNPLAPREAFFNNWLESEPNKTVITGLMTTPYRNDQGNKTNTADVVNSVSGVYPNPNLGPCISEMGALDDATADLVGFAGRFAKVTNENTRLAYGAYVKPLKNDGSQSLNPTPYWVMDKTDAKYLGVMAVEEFSTSLTYPDSLLIPPPSDYSTVNTGAMKANRPNYIGFRDNFINLLYHDTGVCSGTLNSERSGMNVVVELQDRNTELSYQYMLADMMSRHHYYALWNQAVDQYDHDVRVFNNDGYEEGVPTYAFSPEGTGYGANPNSNLSFADVKVHQNGAGDKGNEINTGGATYSTYLTVGSVPSYEIDLAASQRRNFIVSNIADYLPDKYKYNIDGFNPETGNVDPTTYEYMNRRVPLTNVVDLFTTIGARWSIDQMDNVNPFNHHRNWGLKYRSQLLGNSRYCRFHIQVPQKYFAIKNLLLLPGTYTYEWVLRKDPNMILQSSLGNDLRADGASIVYSEVNLMANFMPMDHNTSNQLELMMRNATNDQTFADYLGAKNALYQVPAGSTALTINIPARTWEGMRGWSFTRVKASETPQIGAQYDINFKYSGSIPYSDGTFYLTHTFRNMSVLFDTSINWPGNDRLLAPNLFEIKRNVSINAEGFTMSQCNITKDWYLIQMATNYNYVFNGYRFWPDRQYFHYDFLRNFDPMTCQGPNFQDQTLFDLMSYDPVQTPGAVQTNQDAIRNNSGYTAPRSWPVYGAQQGESWPANWPYPLIGDSSLNPTQIVNYKKFLCDNYLWTVPFSSDFMYMGELTDLGQNPMYTNNSHSMVINFELDPMDENTYVYMLYGVFDMVRVNQPERNVLAMAYFRTPFATGNAV

SEQ ID NO: 65 - protein, 935 aa, Northern Aplomado falcon adenovirus
MAAFTPDLTTATPRLQYFHIAGPGTREYLSEDLQQFISATSSYFDLKNKFRQTVVAPTRNVTTEKSQRLQIRYYPTQTDDTTHGYRVRYSLTVGDSWVLDMGSTYFDIKGFIDRGPSFKPYSGTAYNPLAPRESLFNFWQEKSGNKYVSGQLSNVYTNDNSTTNASTWESAKDFSQTSPNPNVGPFVSDPNLLGTLEKIGVSGRIAKVGSNTVPLTYGAYVKPTSVTGSQTADFTRYYIMDSAGTKYQGAVAVEDVSHTLSYPDTLRIAPAIETSGVDSGISKSLRPNYIAFRDNFINLLYHDTGACSGTLSSERSGMNVVVELQDRNTELSYQYMLADMMSRHHYFALWNQAVDSYDHDVRVFNNDGYEEGVPTYAFQPNGVGNYEAGPDLSESKLFTISSTNHDKETDQNATMNIAWGPVVANEICMSAAMKRNFIMTNIAEYLPDKYKFNIPGFSADNADRRSYEYMNHRVPLVNVVDLFTNLGARWSVDQMDNVNPFNHHRNWGLKYRSQLLGNSRYCQFHIQVPQKYFAIKSLLLLPGTYTYEWVLRKDPNMVLQSTLGNDLRLDGARIVYQEVNLMASFMPMDHNTSNQLELMMRNAVNDQTFADYLGAKSALYSVPAQSTVLTINVPARTWEGMRGWSFTRLKAEETPQQGAQYDINFRYSGSIPYQDGTFYLNHTFRNMSILFDTSINWPGNDRMLTPNMFEIKRSPAADAEGYGMSQSTITKDWFLVQMATNYNYVYNGYRFWPDRHYFHYDFLRNFDPMSMQGPDFNNTDTFDLVTYTHQSPTRHTKTKQNKKRNNSGMVADRAGAPFNKRQGQLWPSNWPYPLIGKESLPVEKILNYRKFLCDNYLWTIPFSSDFMYMGELTDLGQNPMYTNNSHSMVINLEMDPMDENTLVYMLYGVFDTVRVNQPERNVLAMAYFRTPFATG

SEQ ID NO: 66 - protein, 963 aa, Feline adenovirus
ATPSMMPQWSYMHISGQDASEYLSPGLVQFARATETYFSLNNKFRNPTVAPTHDVTTDRSQRLTLRFIPVDREDTAYSYKARFTLAVGDNRVLDMASTYFDIRGVLDRGPTFKPYSGTAYNALAPKGAPNSCEWEQEEPTQEMAEELEDEEEAEEEEAEEEAEAPQADQKVKKTHVYAQAPLAGEKITANGLQIVSDTQTEGNPVFADPTYQPEPQVGESQWNEAEATASGGRVLKKTTPMKPCYGSYARPTNKNGGQGILVANNQGALESKVEMQFFAPSGTAMNERNAVQPSIVLYSEDVNMETPDTHISYKPSKTDENSKAMLGQQAMPNRPNYIAFRDNFIGLMYYNSTGNMGVLAGQASQLNAVVDLQDRNTELSYQLLLDSIGDRTRYFSMWNQAVDSYDPDVRIIENHGTEDELPNYCFPLGGIGVTDTYQGIKSNGNGNPQNWTKNDDFAARNEIGVGNNFALEINLNANLWRNFLYSNIALYLPDKLKYTPTNVEISPNPNSYDYMNKRVVAPGLVDCYINLGARWSLDYMDNVNPFNHHRNAGLRYRSMLLGNGRYVPFHIQVPQKFFAIKNLLLLPGSYTYEWNFRKDVNMVLQSSLGNDLRVDGASIKFDSICLYATFFPMAHNTASTLEAMLRNDTNDQSFNDYLSAANMLYPIPANATNVPISIPSRNWAAFRGWAFTRLKTKETPSLGSGYDPYYTYSGSIPYLDGTFYLNHTFKKVAITFDSSVSWPGNDRLLTPNEFEIKRSVDGEGYNVAQCNMTKDWFLVQMLANYNIGYQGFYIPESYKDRMYSFFRNFQPMSRQVVDDTKYKDYQQVGILHQHNNSGFVGYLAPTMREGQAYPANFPYPLIGKTAVDSITQKKFLCDRTLWRIPFSSNFMSMGALTDLGQNLLYANSAHALDMTFEVDPMDEPTLLYVLFEVFDVVRVHQPHRGVIETVYLRTPFSAGNATT

SEQ ID NO: 67 - protein, 931 aa, Simian adenovirus 1
MATPSMMPQWSYMHIAGQDASEYLSPGLVQFARATDTYFSLGNKFRNPTVAPTHDVTTDRSQRLTLRFVPVDREDTAYSYKVRYTLAVGDNRVLDMASTYFDIRGVLDRGPSFKPYSGTAYNSLAPKGAPNPAEWTNSDSKVKVRAQAPFVSSYGATAITKEGIQVGVTLTDSGSTPQYADKTYQPEPQIGELQWNSDVGTDDKIAGRVLKKTTPMFPCYGSYARPTNEKGGQATPSASQDVQNPELQFFASTNVANTPKAVLYAEDVSIEAPDTHLVFKPTVTEGITSSEALLTQQAAPNRPNYIAFRDNFIGLMYYNSTGNMGVLAGQASQLNAVVDLQDRNTELSYQLMLDALGDRSRYFSMWNQAVDSYDPDVRIIENHGVEDELPNYCFPLGGMAVTDTYSPIKVNGGGNGWEANNGVFTERGVEIGSGNMFAMEINLQANLWRSFLYSNIGLYLPDSLKITPDNITLPENKNTYQYMNGRVTPPGLVDTYVNVGARWSPDVMDSINPFNHHRNAGLRYRSMLLGNGRYVPFHIQVPQKFFAIKNLLLLPGSYTYEWNFRKDVNMILQSSLGNDLRVDGASIRFDSINLYANFFPMAHNTASTLEAMLRNDTNDQSFNDYLCAANMLYPIPANATSVPISIPSRNWAAFRGWSFTRLKTKETPSLGSGFDPYFVYSGSIPYLDGTFYLNHTFKKVSIMFDSSVSWPGNDRLLTPNEFEIKRSVDGEGYNVAQSNMTKDWFLIQMLSHYNIGYQGFYVPENYKDRMYSFFRNFQPMSRQIVDSTAYTNYQDVKLPYQHNNSGFVGYMGPTMREGQAYPANYPYPLIGATAVPSLTQKKFLCDRVMWRIPFSSNFMSMGSLTDLGQNMLYANSAHALDMTFEVDPMDEPTLLYVLFEVFDVVRIHQPHRGVIEAVYLRTPFSAGNATT

SEQ ID NO: 68 - protein, 921 aa, Simian adenovirus 7
MATPSMMPQWSYMHIAGQDASEYLSPGLVQFARATDTYFSLGNKFRNPTVAPTHDVTTDRSQRLTLRFVPVDREDTAYSYKVRYTLAVGDNRVLDMASTYFDIRGVLDRGPSFKPYSGTAYNSLAPKGAPNPSEWTDTSDNKLKAYAQAPYQSQGLTKDGIQVGLVVTESGQTPQYANKVYQPEPQIGENQWNLEQEDKAAGRVLKKDTPMFPCYGSYARPTNEQGGQAKNQEVDLQFFATPGDTQNTAKVVLYAENVNLETPDTHLVFKPDDDSTSSKLLLGQQAAPNRPNYIGFRDNFIGLMYYNSTGNMGVLAGQASQLNAVVDLQDRNTELSYQLMLDALGDRSRYFSMWNQAVDSYDPDVRIIENHGVEDELPNYCFPLGGMVVTDNYNSVTPQNGGSGNTWQADNTTFSQRGAQIGSGNMFALEINLQANLWRGFLYSNIGLYLPDSLKITPDNITLPENKNTYQYMNGRVTPPGLIDTYVNVGARWSPDVMDSINPFNHHRNAGLRYRSMLLGNGRYVPFHIQVPQKFFAIKNLLLLPGSYTYEWNFRKDVNMILQSSLGNDLRVDGASIRFDSINLYANFFPMAHNTASTLEAMLRNDTNDQSFNDYLCAANMLYPIPANATSVPISIPSRNWAAFRGWSFTRLKTKETPSLGSGFDPYFVYSGSIPYLDGTFYLNHTFKKVSIMFDSSVSWPGNDRLLTPNEFEIKRSVDGEGYNVAQSNMTKDWFLIQMLSHYNIGYQGFYVPENYKDRMYSFFRNFQPMSRQVVDTVTYTDYKDVKLPYQHNNSGFVGYMGPTMREGQAYPANYPYPLIGETAVPSLTQKKFLCDRVMWRIPFSSNFMSMGSLTDLGQNMLYANSAHALDMTFEVDPMDEPTLLYVLFEVFDVVRIHQPHRGVIEAVYLRTPFSAGNATT

SEQ ID NO: 69 - protein, 956 aa, Simian adenovirus 21
MATPSMLPQWAYMHIAGQDASEYLSPGLVQFARATDTYFNLGNKFRNPTVAPTHDVTTDRSQRLMLRFVPVDREDNTYSYKVRYTLAVGDNRVLDMASTFFDIRGVLDRGPSFKPYSGSAYNSLAPKGAPNTSQWLDKGVTTTDNNTENGDEEDEVAEEGEEEKQATYTFGNAPVKAEAEITKEGLPIGLEVPSEGDPKPIYADKLYQPEPQVGEESWTDTDGTDEKYGGRALKPETKMKPCYGSFAKPTNVKGGQAKVKKVEEGKVEYDIDMNFFDLRSQKTGLKPKIVMYAENVDLETPDTHVVYKPGASDASSHANLGQQSMPNRPNYIGFRDNFIGLMYYNSTGNMGVLAGQASQLNAVVDLQDRNTELSYQLLLDSLGDRTRYFSMWNQAVDSYDPDVRVIENHGVEDELPNYCFPLDGVGPRTDSYKGIETNGDENTTWKDLDPNGISELAKGNPFAMEINIQANLWRSFLYSNVALYLPDSYKYTPTNVTLPENKNTYDYMNGRVVPPSLVDTYVNIGARWSLDAMDNVNPFNHHRNAGLRYRSMLLGNGRYVPFHIQVPQKFFAVKNLLLLPGSYTYEWNFRKDVNMVLQSSLGNDLRVDGASISFTSINLYATFFPMAHNTASTLEAMLRNDTNDQSFNDYLSAANMLYPIPANATNVPISIPSRNWAAFRGWSFTRLKTKETPSLGSGFDPYFVYSGSIPYLDGTFYLNHTFKKVSIMFDSSVSWPGNDRLLTPNEFEIKRTVDGEGYNVAQCNMTKDWFLVQMLANYNIGYQGFYVPEGYKDRMYSFFRNFQPMSRQVVDEINYKDYKAVAVPYQHNNSGFVGYMAPTMRQGQAYPANYPYPLIGTTAVTSVTQKKFLCDRTMWRIPFSSNFMSMGALTDLGQNLLYANSAHALDMTFEVDPMDEPTLLYLLFEVFDVVRVHQPHRGVIEAVYLRTPFSAGNATT

SEQ ID NO: 70 - protein, 949 aa, Unknown
  Unidentified adenovirus
MATPSMLPQWAYMHIAGQDASEYLSPGLVQFARATDTYFNLGNKFRNPTVAPTHDVTTDRSQRLMLRFVPVDREDNTYAYKVRYTLAVGDNRVLDMASTFFDIRGVLDRGPSFKPYSGTAYNSLAPKGAPNTSQWIAEGVKKENGESDEEEEKNLTTYTFGNAPVKAEGGDITKDKGLPIGSEITDGEAKPIYADKLYQPEPQVGDETWTDTDGTAEKYGGRALKPETKMKPCYGSFAKPTNVKGGQAKQKTTEQLQNQQVEYDIDMNFFDQASQKANFSPKIVMYAENVDLETPDTHVVYKPGTSEESSHANLGQQSMPNRPNYIGFRDNFIGLMYYNSTGNMGVLAGQASQLNAVVDLQDRNTELSYQLLLDSLGDRTRYFSMWNQAVDSYDPDVRIIENHGVEDELPNYCFPLDGVGVPTTSYKIIEPNGEGADWKEPDINGTSEIGQGNLSAMEINLQANLWRSFLYSNVALYLPDSYKYTPANVTLPTNTNTYDYMNGRVVPPSLVDTYVNIGARWSLDAMDNVNPFNHHRNAGLRYRSMLLGNGRYVPFHIQVPQKFFAVKNLLLLPGSYTYEWNFRKDVNMVLQSSLGNDLRVDGASISFTSINLYATFFPMAHNTASTLEAMLRNDTNDQSFNDYLSAANMLYPIPANATNVPISIPSRNWAAFRGWSFTRLKTKETPSLGSGFDPYFVYSGSIPYLDGTFYLNHTFKKVSIMFDSSVSWPGNDRLLTPNEFEIKRTVDGEGYNVAQCNMTKDWFLVQMLANYNIGYQGFYVPEGYKDRMYSFFRNFQPMSRQVVDEINYKDYKAVAVPYQHNNSGFVGYMAPTMRQGQAYPANYPYPLIGTTAVTSVTQKKFLCDRTMWRIPFSSNFMSMGALTDLGQNLLYANSAHALDMTFEVDPMDEPTLLYLLFEVFDVVRVHQPHRGVIEAVYLRTPFSAGNATT

SEQ ID NO: 71 - protein, 932 aa, Simian adenovirus 3
MATPSMMPQWSYMHIAGQDASEYLSPGLVQFARATETYFSLGNKFRNPTVAPTHDVTTDRSQRLTIRFVPVDKEDTAYSYKTRFTLAVGDNRVLDMASTYFDIRGVIDRGPSFKPYSGTAYNSLAPKGAPNNCQWQSGVQPKVNTYGQAAFINDFVDNNNGHTGIKVGDNAEGQPIVADPTFQPEPQTGGLDTQWNTVPNTNNLKLEAAGRALKYTTPMKPCYGSYARPTNENGGQGTLGNNGKTTPAELQFFDLASKNNDYSPAVTMYTEDVYLETPDTHIIYNPETVNGNTNTQLLLGQQAAPNRPNYIGFRDNFIGFMYYNSTGNMGVLAGQASQLNAVVDLQDRNTELSYQLMLDALGDRTRYFSMWNQAVDSYDPDVRIIENHGVEDELPNYCFPLSAVGIVNDYKGITKNGGNWQVDQTDSDRNEIATGNIFAMEINLQANLWRSFLYSNVALYLPDSYKYTPANVTLPENKNTYGYINGRITAPGLIDTYVNIGARWSPDPMDNVNPFNHHRNAGLRYRSMLLGNGRVVPFHIQVPQKFFAIKNLLLLPGSYTYEWSFRKDVNMILQSTLGNDLRVDGASVRIDSVNLYANFFPMAHNTASTLEAMLRNDTNDQSFNDYLSAANMLYPIPANATNVPISIPSRNWAAFRGWSFTRLKAKETPSLGSGFDPYFVYSGTIPYLDGSFYLNHTFKRLSIMFDSSVSWPGNDRLLTPNEFEIKRVVDGEGYNVAQSNMTKDWFLIQMLSHYNIGYQGFYVPEGYKDRMYSFFRNFQPMSRQIVDPTSYTAYQAVALPHQHNNSGFVGYMGPTIREGQPYPANYPYPLIGATAVPAITQKKFLCDRVLWRIPFSSNFMSMGALTDLGQNMLYANSAHALDMTFEVDPMDEPTLLYMLFEVFDVVRVHQPHRGIIEAVYLRTPFSAGNATT

SEQ ID NO: 72 - protein, 903 aa, Equine adenovirus 2
MATPSMMPQWSYMHIAGQDASEYLSPGIVQFAQARKPYFHLGNKFRNPTVAPTHERTTERFAEACSCAFVPVDKEDTVYTYKTRFQLAVGNNRVLDMGRTYFYIRGTLDRGPSFKPYSGTQYNQLAPKGAPNPCQYQKNNTTVTFGQAAFEGVEITASGLRIAVDKYCDPTYQPEPQIGIDSWEPGTTLSDDIAAVGGRVLNNQQNPTPCYGSYAPPTNVDGGQGDGNPTLKFFKTGTQAARPDIVLYSENVNLMMPDSHIVYKVGTDEEQSRAALAQQAAPNRPNYVAFRDNFIGLLYYNSNGNLGVLAGQASQLNAVVDLQNRNTELSYQLLLDSLVDRNRYFAMWNQAVDSYDPDVRIVENVGVEDEMPNYAYPLSGMNPTAANRNSWRSRVPNEEGWVSKGNLDALELNIPANLWRGFLYSNVAMYLPDKYKFTPPNTTLPENENTYDYMNGKLPAAGLIDSYVNVGSRWSLDVMDNINPFNHHRNAGLRYRSQILGNGRYCKFHIQVPQKFFAIRNLLLLPGTYTYEWSFRKDVNMILQSTLGNGLRVDGASITYENITLYASFFPMAHNTASTLEAMLRNDTNDQSFIDYLSAANMLYTIPAGATQVPISIPSRNWAAFRGWSFTRIKAKETPALGSPFEPYFNYSGTIPYLDGTFYLSHTFRRVSVQFDSSALGPETTVFFTPNEFEIKRLIDGEGYNVSQSNMTKDWFLVQMLAHYNIGYQGYHLPESYKDRWYGPLRNFQPLCRQVPDPLRFTDYKAVSVLNQHNNSGFTGYNSAGLMREGQPYPANWPYPLIGKNAVASVTERKFLCDKTLWRIPFSSNFMSMGTLTDLGQNLLYANAAHALDMTFEVDPMEEPTLLYLLFQVFEVARVHQPHRGVIEVVYLRTPFSAGNATT

SEQ ID NO: 73 - protein, 952 aa, Human adenovirus 5
MATPSMMPQWSYMHISGQDASEYLSPGLVQFARATETYFSLNNKFRNPTVAPTHDVTTDRSQRLTLRFIPVDREDTAYSYKARFTLAVGDNRVLDMASTYFDIRGVLDRGPTFKPYSGTAYNALAPKGAPNPCEWDEAATALEINLEEEDDDNEDEVDEQAEQQKTHVFGQAPYSGINITKEGIQIGVEGQTPKYADKTFQPEPQIGESQWYETEINHAAGRVLKKTTPMKPCYGSYAKPTNENGGQGILVKQQNGKLESQVEMQFFSTTEATAGNGDNLTPKVVLYSEDVDIETPDTHISYMPTIKEGNSRELMGQQSMPNRPNYIAFRDNFIGLMYYNSTGNMGVLAGQASQLNAVVDLQDRNTELSYQLLLDSIGDRTRYFSMWNQAVDSYDPDVRIIENHGTEDELPNYCFPLGGVINTETLTKVKPKTGQENGWEKDATEFSDKNEIRVGNNFAMEINLNANLWRNFLYSNIALYLPDKLKYSPSNVKISDNPNTYDYMNKRVVAPGLVDCYINLGARWSLDYMDNVNPFNHHRNAGLRYRSMLLGNGRYVPFHIQVPQKFFAIKNLLLLPGSYTYEWNFRKDVNMVLQSSLGNDLRVDGASIKFDSICLYATFFPMAHNTASTLEAMLRNDTNDQSFNDYLSAANMLYPIPANATNVPISIPSRNWAAFRGWAFTRLKTKETPSLGSGYDPYYTYSGSIPYLDGTFYLNHTFKKVAITFDSSVSWPGNDRLLTPNEFEIKRSVDGEGYNVAQCNMTKDWFLVQMLANYNIGYQGFYIPESYKDRMYSFFRNFQPMSRQVVDDTKYKDYQQVGILHQHNNSGFVGYLAPTMREGQAYPANFPYPLIGKTAVDSITQKKFLCDRTLWRIPFSSNFMSMGALTDLGQNLLYANSAHALDMTFEVDPMDEPTLLYVLFEVFDVVRVHRPHRGVIETVYLRTPFSAGNATT

SEQ ID NO: 74 - protein, 382 aa, Ovine adenovirus 7
MSSKKVTKSIKKRKSTTEEFQNKVQAALEILAKFGECVKVDTSQMKFHPEEGDCEKLFAQYMKKMKIINLTYSSSKSMATVGGRMLYSAICKQIDLIPNFNASGCYLWYHDWEEDRPRCFHGDFMFKRVNEIEMPPTSEAGVQALKEGRGVLSNGRMNKQVVKIVQEHYVLCAEDAHQRFGQCSPRSCGLNFSDEKKALLAMQNAIETTKAVFPKAKVGNMLFILGQCECNYGGKQTIGKQLPKITPFSISGVEGIDVQDVNRVQAAAVTFPAVFVFQCCNYQYNLRRNNGKFCEMKISLPDMLQCLTLVRKFWNECMGNNIPIQFSQFKWNQSFQVKNTMLPNIEEDSDMNPFGTIEEPTPSKKKKTILESSSEEEDEDED

SEQ ID NO: 75 - protein, 380 aa, Bovine adenovirus 4
MSTKKGSKLARKGRSENEETQQKIQAALEIVSKFGEYVKVETSQMKFHPEEGDCEKLFSQYLKKHKSINLTYSNFKSMAIVGGRMLYSAICKQIGLVPNFNVTGCYLWYHDWDERPRCFHGDFMLKKVNEIEMSPTSEMGIQALKEGRGILCNGKMNKQVVKVVQENFMLCSEDAQQRFGQCSPRSCGLNFSDEKKALIAMQNAFQTTKAVFPNAKIGNMLFILGQCECNYGGKLVIGKQLPKITAYTITGVEGIDAQDVSKVQAAAVMYPAVFVFQCCNFQFTSKRNTTKFCEMKISVPDMLQCLTLVRKFWFECMGTPLPINFPQFKWNQCFQVKNTVLPSIEEDVEANPFGEVEEAPPKKKKRTVLESSSEEDDEDD

SEQ ID NO: 76 - protein, 380 aa, Bovine adenovirus D; identical to SEQ ID NO: 75

SEQ ID NO: 77 - protein, 387 aa, Duck adenovirus A
MSSKKSTATSSKKAKRSAGLTDTELERQQNESLFQAALEVVYKLGEHLKVETKDVTFHPFDTGLEKLFAQTLKKAKYTPIYSAAKSMNVVGGRLLYGAICNYVGLAPNFNPTGCSLWEHGWEEGVRCYHSEKMILKENIIEMTPTSEAAISALKEGRGLLSSNKYGKQVVRIVQENSMICPEDLRQTRFGTFSNSSCGLNFTDGEKAKLAYKNATAYIQAVFPKTAMQHLLFIVTACECNYGGQLILGKQIPKMTPYTVSGVENISVKDLDPVKAVGVKYPAVFVFQCCNFQGQKRAGNAKSCEFKISLPDLIHCLITARNLWFEVMGEPMPVQFPLFKWSPALQVKNTLLPSCDVCTEDNPFGEIPTKRKRVVEIESDEDEEEDED

SEQ ID NO: 78 - protein, 397 aa, Snake adenovirus
MSLSKTKNPALLAGPGDEAKEKVQAALELLHKFGSAFKVDTAGFSFHPESPECDKIFGAYLKNVKHVPTYSSAKTLTSVGGRILYAATCQYVKLTPVTNLTGCTLWEHGWGQNLKCYHGEGMCRKKNEIEMAATSESGVAALKEGRGAVEINRWGRQVVKITQENYVICMEDLQSRFNQPSANSCGLSFSDSDKARSAMENATELTRSIFSQAKMDHLLFMPICCYCNYGGKMILGRQLCKLTPFSISGTEGLREEDVSPVQAVSVRHPAVFVFQCCNATGGSKGKTSCDFKISHADLLQVLNLVRKMWLEVMGYPMPIHFPRFKWSPSLRVKNALLPEGSVNEDENPFGLDNSEDEEEVVPPSPPSPARKRTRTTVAEVHHKKKKKIVLESSEEDE

SEQ ID NO: 79 - protein, 441 aa, Fowl adenovirus 1
MERTPKRAHGFRSTKPVKRTAEVMMEEEEEEVEVVAPGRGATRKKVSRREESPSPVRRVTRRRETVVDDEENASDEESPEAPLSDPVVYGAQRAMATVASICEALDLQWQGASVRPDDSIWTKMGGTYVRKKHPEFRLTFSSYDSFNAQVGRFLAAVIYSRAGLEPKFVPGGAHVWRHGWFPALQEPFPKCMHGVDMVTKPRTVELNPSSEAGKRALAEQNGVIEKNRFGRQVVVLRFDANAVCYKDQEHSGFPHPHAHGSCAMVFSDAAKAVSAMRHDIDWTKALYPNADKRRAEECVLISTNCNCNYASDRAISGRQFCKMTPYKLNGTDDITRDMVESRPDMKAHKKNPHTMVFTCCNPQAASGGAGRGLKKTEKTCAWRLSAMDLRYAYVFATELFTAVMGSSEPTHVPEFRWNESYAFKTEVLAPVSPIASDDPFA

SEQ ID NO: 80 - protein, 549 aa, Fowl adenovirus A
MAETLHPETISSDEDVADFVDLEEPGPSTVIKSNRGRSRPLPPQRPTGPKDPENPLEKQKSEDLPRSHPGPRKLQKTLPPSPAVVPDSEEEGEQELFETRDPVTEAEVMERTPKRAHGFRSTKPVKRTAEVMMEEEEEEVEVVAPGRGATRKKVSRREESPSPVRRVTRRRETVVDDEENASDEESPEAPLSDPVVYGAQRAMATVASICEALDLQWQGASVRPDDSIWTKMGGTYVRKKHPEFRLTFSSYDSFNAQVGRFLAAVIYSRAGLEPKFVPGGAHVWRHGWFPALQEPFPKCMHGVDMVTKPRTVELNPSSEAGKRALAEQNGVIEKNRFGRQVVVLRFDANAVCYKDQEHSGFPHPHAHGSCAMVFSDAAKAVSAMRHDIDWTKALYPNADKRRAEECVLISTNCNCNYASDRAISGRQFCKMTPYKLNGTDDITRDMVESRPDMKAHKKNPHTMVFTCCNPQAASGGAGRGLKKTEKTCAWRLSAMDLRYAYVFATELFTAVMGSSEPTHVPEFRWNESYAFKTEVLAPVSPIASDDPFA

SEQ ID NO: 81 - protein, 437 aa, Fowl adenovirus 9
MVKDSAPKTTSKKMASSDDHENAEPAMVDSKKKRSAKSRGAAPSKKARKETQEREEVDEKKSELDVESDEELERPLSDPVEYGAQKAMKILTTICDRLDVRWQGSTIRPDDAIWTRIGGTFVRKRHPEFRLTFSSFDSFHNQVGRFLAAMVYGMAELEPKFVPEGAHVWRHGWEATTNTTPKCLHGNAMFLKPRTVELNPTSEAGKRAIAEQNGQIEKNRFGKQVVVLRFDRNAVCSRDADHSGFPYPHVIGSCGMAFSDAAKAVSAMRHDLEWTKALYPNAEKRRAEEHILISTNCNCNYAVQGPISGRQVCRMIPYKLSGTDDIASDTARSRPDMKAHKKYPHTMVYTCCNPQSPSGTDGPTSRSGRKTSDKTCAWRLSAMDLRHAYVFATELVLNAMGVQAPTHVPEFRWHERFGFKTEVIAPVKPVETGDPFA

SEQ ID NO: 82 - protein, 556 aa, Fowl adenovirus D
MAEAADRDLWVVSSDEDDEEIRQVFGAREKTPMPNSDDSESDWSQPKTRPLQEAPLPKETLPPSDRRGTGSCSLPRWHKSHPVKVQKRRLEVEEVFSSSEESSPGEDEEEEEGETDRSGMVKDSAPKTTSKKMASSDDHENAEPAMVDSKKKRSAKSRGAAPSKKARKETQEREEVDEKKSELDVESDEELERPLSDPVEYGAQKAMKILTTICDRLDVRWQGSTIRPDDAIWTRIGGTFVRKRHPEFRLTFSSFDSFHNQVGRFLAAMVYGMAELEPKFVPEGAHVWRHGWEATTNTTPKCLHGNAMFLKPRTVELNPTSEAGKRAIAEQNGQIEKNRFGKQVVVLRFDRNAVCSRDADHSGFPYPHVIGSCGMAFSDAAKAVSAMRHDLEWTKALYPNAEKRRAEEHILISTNCNCNYAVQGPISGRQVCRMIPYKLSGTDDIASDTARSRPDMKAHKKYPHTMVYTCCNPQSPSGTDGPTSRSGRKTSDKTCAWRLSAMDLRHAYVFATELVLNAMGVQAPTHVPEFRWHERFGFKTEVIAPVKPVETGDPFA

SEQ ID NO: 83 - protein, 346 aa, Turkey adenovirus 3
MQYATGLQALFACQAEANILPTSDYWAKLVETYVKKNKPDLNLTISSAKSFYHFAGRIVSSFVYNDSGLICNYNCLGANIWVHNWDEDNIRCFHGTVMLSKPITYSLSPQSEEGMRALTAGEGRLEKEKNQKDVIKLTNYSNIVCPLDSNVQWPTIHSPDSCGMNFGNKEKAKAAFLHNIDWTSAMFPKAKKCEISEKMIIVTKCFCNYGHENIQLGRQICKMTAFEIPGANDIDPESCHDDMLLATAKYKHTFVFQCCNPIRLKRNAKDKDNQTHKHCDFKLSMIDVRQAMKISKDIYTKLKETIDDGSPTKIMLPAFVFNPKKHSFKQAIVAQHEVESDDDAFC

SEQ ID NO: 84 - protein, 380 aa, Turkey adenovirus A
MSSDQRSLVDSEEEPCLKRQRVENDEFENCHQKAMQYATGLQALFACQAEANILPTSDYWAKLVETYVKKNKPDLNLTISSAKSFYHFAGRIVSSFVYNDSGLICNYNCLGANIWVHNWDEDNIRCFHGTVMLSKPITYSLSPQSEEGMRALTAGEGRLEKEKNQKDVIKLTNYSNIVCPLDSNVQWPTIHSPDSCGMNFGNKEKAKAAFLHNIDWTSAMFPKAKKCEISEKMIIVTKCFCNYGHENIQLGRQICKMTAFEIPGANDIDPESCHDDMLLATAKYKHTFVFQCCNPIRLKRNAKDKDNQTHKHCDFKLSMIDVRQAMKISKDIYTKLKETIDDGSPTKIMLPAFVFNPKKHSFKQAIVAQHEVESDDDAFC

SEQ ID NO: 85 - protein, 378 aa, Frog adenovirus 1
MSEKRPAVDHEEEPQAKKQLEDNFILCEEAAKNYASALAGMIGCPTDVNLLPTSEFWARISENYIKKFRTDFFLTNSTLKSFTHYLGRLLASYVHATAGFEPKFNILGSEIWVHNWEEGENLELRCFHGEKMMKKTISYELVPTTVEAVKALASGEGKLEKGKGNKDVVKIVNNKNYVCPKDIDYNGFPAIHASTSCGLNFANGEKAKSAFLHYADWTQAMYPKANRASIREKMIIVTRCLCNFGHDNVQVGRQISKLTPFEIPGSNDLTQDQMDECGMMKATGQHQATIVFLCCNPVNFRAKVTIAKNCDFKLSMIDLRLAIKMSKEIWAKLNDQLEGKLAPAKLAFPVFKFDPKRHCYKSAVVCAQEVEEDEDVFC

SEQ ID NO: 86 - protein, 461 aa, Murine adenovirus 3
MSCSRPLPPHRVGQQQVFGSRKGGMKRLPPTEAGESSKRSRTVAEAVTSTGGSGSTGGIGDRPLGAVCDSPTNPEPQEEVLPRRRFESSDEEEDVFDDGTVTEEEACWQTAREFLHKMCLPLKVDGKQCTFLPNAQTAELFRKLCHSWLLQQKMVPSLTFTTLRSFTMQMGRFVLALLLQASGLSPTEAAAHSIANVSGVAAWKHASDVTLHCLHGAVMIAKDHHVDLDVSSEGGQRALKEQGPNAVVTTNRWGRSVVRVKYDAFVCPMDAGVPFNQPSNKSCGFCFTDGKKALKGFKQIVAFQAALYPQAAGGGEWMLLCLRCECNFGVAQPILGRQTCRLTPYQLSLAEGLDGGNMDAVAKASVENPVVLVAQCCNVTFSKAGKAGGAAAGKTCEWKISSVDLVTAAQLAKKMIHKMLDLPPSLFVPEFKWDPVFSFRSTVLPQGVGDSDLQLFTTGGM

SEQ ID NO: 87 - protein, 461 aa, Murine adenovirus A
MSCSRPVPPQRTPQQQVYETKRGGVKRSAVGEASTAHCGKKSRAALGPRSSPLAPAVSGKFANVSGGDRGSEDVNMEPEPQTEVPPRFESSDEDDVVFTEAGVAEEEEACWQTARELLHKMCLVLKVDGKQCTFLPNAQTAELFRKLSHSWLLQQKLVPSLTFSTLRSFTMQMGRFVFAMLLQAAGISPVDFAAHTLGNVTGVAAWKHNCSTTLHCLHGTAMSPKDHQVELDVTTEGGQRALKEQGSAACVQTNRWGRSVVRVTYDAVVCAMDASVAFNQPTNKSCGFCFTDAKKALKGFKQAIAFQQALYPQAPGVGERMLLCLRCECNFGLAQPILGRQTCRVTPYALSLAEGLDATALDPVARASVENPVVLVYQCCNVTFGKAGKGTVGKSCEWKISSVDVVTAAQLAKKMIQKLLDQPPSLFVPEFKWDPTLCFHSTVLPQGAGDGDVQLFVTAKV

SEQ ID NO: 88 - protein, 513 aa, Simian adenovirus 22
MAGRGGSQSEQRRQERTPERGRGSASRPPNRESPSPPPLPQKRHAYRRVVSDDGQEEEIVVVSENSRSPSTSPPPPLPPKKKPRKTKHVPLQDISQDSEDERQAEEELAAVGFSFPPVRITEKDGKRVFETLDENDPLTSAAATKMTTAVKNPLSLPIVSAWEKGMEVMTLLMDRYRVESDLKSAFQLMPEQGEVYRRICHLYVNEEHRGIPLTFTSNKTLTTMMGRFLQGFVHSHSQIAHKNWECTGCALWLHGCTEAEGKLRCLHGTVMIQKEHTIEMDVASENGQRALKENPDRAKITQNRWGRSVVQLANNDARCCVHDAGCATNQFSSKSCGVFFTEGGKAQQAFRQLEAFMKAMYPGMSSEQAQMMLIPLHCDCNHKPGCVPSMGRQTCKMTPFGMANAEDLDVEGITDATVLASVKHPALMVFQCCNPVYRNSRAQNAGPNCDFKISAPDLLGALQLTRKLWSDSFPDLPVPKLLIPEFKWLPKYQFRNVSLPAGHAESRQNPFDF

SEQ ID NO: 89 - protein, 512 aa, Simian adenovirus 24
MAGRGGSQSEQRRQERTPERGRGSASRPPNRESPSPPPLPQKRHAYRRVVSDDGQGEEIVVVSENSRSPSTSPPPPLPPKKKPRKTKHVPLQDISQDSEDERQAEEELAAVGFSFPPVRITEKDGKRVFETLDENDPLTSAAATKMTTVKNPLSLPIVSAWEKGMEVMTLLMDRYRVESDLKSAFQLMPEQGEVYRRICHLYVNEEHRGIPLTFTSNKTLTTMMGRFLQGFVHSHSQIAHKNWESTGCALWLHGCTEAEGKLRCLHGTVMIQKEHTIEMDVASENGQRALKENPDRAKITQNRWGRSVVQLANNDARCCVHDAGCATNQFSSKSCGVFFTEGGKAQQAFRQLEAFMKAMYPGMSSEQAQMMLIPLHCDCNHKPGCVPSMGRQTCKMTPFGMANAEDLDVEGITDATVLASVKHPALMVFQCCNPVYRNSRAQNAGPNCDFKISAPDLLGALQLTRKLWSDSFPDLPVPKLLIPEFKWLPKYQFRNVSLPAGHAESRQNPFDF

SEQ ID NO: 90 - protein, 512 aa, Simian adenovirus 23
MAGRGGSQSEQRRQERTPERGRGSASRPPNRESPSPPPLPQKRHAYRRVVSDDGQEEEIVVVNENSRSPSTSPPPLPPKKKPRKTKHVPLQDISQDSEDERQAEEELAAVGFSFPPVRIIEKDGKRVFETLDENDPLTSAAATKMTMAVKNPLSLPIVSAWEKGMEVMTLLMDRYRVESDLKSAFQLMPEQGEVYRRICHLYVNEEHRGIPLTFTSNKTLTAMMGRFLQGFVHSHSQIAHKNWECTGCALWLHGCTEAEGKLRCLHGTVMIQKEHTIEMDVASENGQRALKENPNRAKITQNRWGRSVVQLANNDARCCVHDAGCATNQFSSKSCGVFFTEGGKAQQAFRQLEAFMKAMYPGMSSEQAQMMLIPLHCDCNHKPGCVPSMGRQTCKMTPFGMANAEDLDVEGITDATVLASVKHPALMVFQCCNPVYRNSRAQNAGPNCDFKISAPDLLGALQLTRKLWSDSFPDLPVPKLLIPEFKWLPKYQFRNVSLPAGHAESRQNPFDF

SEQ ID NO: 91 - protein, 462 aa, Simian adenovirus 1
MANRQNQAGSSITPYLREMSPEREQEAPQLPPKKKARKATPAPPPSPEIVSDSEGEGTVVEVGFSYPPVRRVRRADGSVEFQRMTMKDVGAGEGPSTAVLVKNPDSKPLVTAWEKGMETMMMLMEKFHVDNDSRAAFKFLPDQGAVYRKICQTWLNEEHRGLPLTFTNQKTFTELMGRFLMAYMEAYAGVKHKSWEPTGCAVWEHRSTQQEGVLFCFHGVEMVCKEHVLEMDVTSENGQRALKEHPTRAKVVQNRWGRNVVQLKNEDARCCAEDVNCGHNVFSSKSCGLFYTEGGKAQMAFRQMEEFLAASYPIMQRGQRRILIPLRCDCLNKRDLVPQIGRQMCKLTPFALSNAEDLDASEVTDPTALASIHNPGVLVFQCANPVFRNSRGSSGPNCDFKISAPDVMGALQLVRQFWKQNLEDVPLPRLVIPEFRWSARFQYRNVSLPSGHEDPSLEPFDF

SEQ ID NO: 92 - protein, 462 aa, Simian adenovirus 7
MANRQNQPGSSITPYLREMSPEREQEVPPLPPKKKARKSAPVPPPSPEIVSDSEGESTVMEVGFSYPPMRRVRRADGTVEFQKMSMKDVGAGEGPSTAVLVKNPESAPLVTAWEKGMEVMTMLMEKFHVDNESRTTFKFLPDQGAVYRKICQTWLNEEHRGLPLTFTNQKTFTELMGRFLMAYMEAYAGVKHKSWESTGCAVWEHRNTQQEGILFCFHGVEMVCKEHVVEMDVTSENGQRALKEHPTKAKVVQNRWGRNVVQLKNEDARCCAEDINCGNNVFSSKSCGLFFTEGVKAQMAFRQIEEFLAASYPIMQRGQRRILIPLRCDCLNKRDLVPQIGRQMCKLTPFALSNAEDLDASEVTDPTALASIHNPSVLVFQCANPVFRNSRGGSGPNCDFKISAPDVMGALQLVRQFWKQNMEDVALPRLVIPEFRWSARFQYRNVSLPSGHEDPSLEPFDF

SEQ ID NO: 93 - protein, 493 aa, Cynomolgus adenovirus 1
MADRQDQRERTPERPRPATPSIRRYLQASPERAPTPAPPQKKARKSLLAPLAEMPPSPEIVLDSDDEENLAIAEESQAGVVTMVGFSYPPVQITRNPDGSRAFKKLPPPPLPADAEKDEEQPSTSRAAVVVRNPLSKPVVSAWEKGMAVMHVLMDKYKIEDRAAFHFMPQSFEVYRKICHTWLQEDLKYCPLTFSTQKTFSAMMGRFLNKYVLLHAGIENPLYKSWEPTGCVVWEHRCTEQEGQLMCLHGLPMIAKDHVVEMDVSSEAGQRALKETPQLAKVVQNRWGRNVVQLRHDNARCCMFDAQCGTNVFSGKSCGMFYSEGGKAQQAFRQIEAYMQAAYPHMQRGQKHLLMPLRCDCNYLGDAVPRAGRQVCKITPFALPGAEDMKHDEVTDPVALASLNHPSLLVFQCANPAYRNTRATNQVNCDFKISATDVLLALQLVRNLWHDHFVEAGLPKMVLPEFKWQPRYQYKNLTLPTAHLDYQLNPFEF

SEQ ID NO: 94 - protein, 472 aa, Bat adenovirus TJM
MSHVISSSSDEDIPVPVRKRQRKSKEDAKARAKESPRPEKEDSSLVGHGYALEMTRRANAILEAQGKPGGFYIQTFCGQRVEKDANGEIQFIKQDPPSAPPLPMDPALKAQLMEPLIQAAVDMRPTKANEHQWQLGMEMALKILTAYQVDHKELTLLPDSGTLECFKKAAQAYLVNTKTVVTYNFTTQKSFQHMVGRILLDFVIKAAGVAPGLNPSGCVVWQHGCQRQLHCLHGSPMIQKEQLIEMDVNSENAQRVLKENPEKTKIVTNRWGRNVVQMKNEDAYCCFMDVNISGGNFSSSSCGMSYTDGPKALMAFQQIMAFQRACYPQMSTAESHLLMPLKCECNWNNSLPMLGRQTCKMTPYALSSTADIDRSLVQDAKMLATLDHPAMLVFQCCNPVYRNSKAAPQKNCDFKISTVDMVACVQIAKKIWSTCIGTPPPLKFPEFKWSQEYKYQTTILPQGQEDNDVSLF

SEQ ID NO: 95 - protein, 454 aa, Canine adenovirus 1
MSHKKVVAISESSSDEEVPVAPPTAPPKKRQRKAVEEPRGHQAMVEIARQATAALKARGDPGSIIVQTFCDQTVDVDKEGNVIFTPAKQKSICNKSGSPLASVASKIFKASEHKWQSAMEFALKVLNAYQVDHSKLTLLPDEGTLECFKKAVQAYITTSKMHVTYTFTNQKTFLHVAGRLLLDFVIKAAELAPGVNPSGCVVWQHGCQSSLMCLHGSPMIQKEQLVEMDVNSENAQRALKENPEKTKIVSNRWGRNVVQFKNEDAFCCSMDVNMSGGNFSGASCGMFYTDGPKAIMAFQQIMAFLKACYPSMPNAESHLLMPLKCECNWNSSLPLLGRQTCKITPFSLASANHIDKSEVDDQKMLATLNNPAMLVFQCCNPVYRNSKAAPQKNCDFKISSVDLVSCLQIAKQIWLSTVGEKPPVKFPEFHWSDEHRYQTTILPQGQHDDDLVLF

SEQ ID NO: 96 - protein, 454 aa, Canine adenovirus 2
MSHKKVVAISESSSDEEVPVAPPTAPPKKRQRKAVEEPRGHQAMVEIARQATATLKARGDPGSIVVQTFCGQTVDTDKEGNVVFIPPKQKSVWSKPNAPSGLVASKFFKASEHKWQSAMELALKVLTAYQVDHSKLTLLPDEGTLECFKKAVQAYITTSKTHVTYTFTNQKTFLHVAGRLLLDFVIKAAELAPGVNPSGCVVWQHGCQSSLMCLHGSPMIQKEQLVEMDVNSENAQRALKENPEKTKIVSNRWGRNVVQFKNEDAFCCSMDVNMSGGNFSGASCGMFYTDGPKAIMAFQQIMAFLKACYPSMPNAESHLLMPLKCECNWNSNLPLLGRQTCKITPFSLASASHIDKSEVDDQKMLATLNNPAMLVFQCCNPVYRNSKAAPQKNCDFKISSVDLVSCVQIAKQIWTSTVGERPPIKFPEFHWSDEHRYQNTILPQGQHDDDLVLF

SEQ ID NO: 97 - protein, 435 aa, Bovine adenovirus 10
MSQESQNDFLTNESVFMDENVAKKARKRPLSVINTEAVEDIEEIEEMFSVGFSNPPCKLGPKQIVKKKAGFLTGGQLSCKKSKTVEEVDWQKAMDLAVQILQPLKVDIKELTLVPDAYKFRNFRKAMPKLGCNDKKIHLNLTFSTQKTVTTLMGRFIFSFVLRAGGMAPSNWNPTGCVIWNHKCLDNLKCFHGLTMVSKDQLVEMDVTSENAQRALKETPQKAKITTNRWGRSIVQLKNEDAACCFHDASCNAGTFSNKSCGLFYTEGQKALQAFKQIMEFQKACYPKMANAMSHLLLPIKCDCNWGTGYMPLLGRQMCKVTPFSMSGGRLIVEKHLIDRIPKLLAYLCNNPSILVFQCCNPVYRHSKANPQKNCDFKISAPDVILALQLAKQMWSSLINCPVPLVLEEFKWQTQYQYQNTILPVAYVDTDESLF

SEQ ID NO: 98 - protein, 441 aa, Porcine adenovirus 5
MRFVTFFSILHLEKMSRNHYEDVSDSSADDEPRLVIDDQPKPKKIARRRKADGDKLDGAAKSHDESNKKRARVLSDTDEETPSTSVKSSKLLLDRNEVKWQKAMDVAMSLMVPLKVDTKDLTLLPDHATMECFKKAAQAWMSDRKKFIQLTFSTQKSLLTVMARFLFDFVIREAELNTPDWNPTGCVVWNHKCGDRLHCLHGMAMINKEQLVEMDINSENGQRALKETPEKAKIVTNRWGRSVVQIRNSDAMCCVNDAKSPINTFSPQSCGYFYSDGPKAVTAFRQIAAFVKAIYPNMATAESHLLMPLVCECNYGANHLPLLGKQTCKVTPFAMSTAGNIDRNLIDDPKVLATLDHPAVLVFQCCNPVFRNTKANPQKNCDFKISSTDVVSALQLAKQMWQNIIGTKVNLSVPEFRWHPQYQVQNTILPTGQHDDDDCLF

SEQ ID NO: 99 - protein, 442 aa, Ovine adenovirus A
MSQNHYEDIFDSDEEGKLVIDETPRVKKVTKRKKATEDITPPTTPDIVEPASSKKVRVIESDDEAPSTSKGKKRSVVSKPNVSPAAKISRKLLDQNEMKWQKAMDVAVSFLVPLKVDIKDLTLLPDAGTMECFRKGVQSWLNEQKRFVPLTFSTQKSLQTAVARFVFDFVLRAAEICPADWNPNGCVVWEHKTNEEKLYCLHGLPMINKEQIVEMDINSENGQRALKESPERAKIVTNKWGRSVVQMKNADAMCCFYDLKSSLNSFSSESCGYFYSDGNKARQGFYQIRDFVKAMYPQMPKAGEMLLMPLVCECNYGHHVIPLLGKQTCKVTPFALNAVSNIDRSLVEDAKVLATLNNPVVLVFQCCNPVFRNTKANPQKNCDFKISSTDVVMALQLAKQMWSSLTGTKASIVVQEFKWQPQYRVQNTLLPTGQDDADECLF

SEQ ID NO: 100 - protein, 457 aa, Porcine adenovirus 3
MSRRYSDVSDYDSGEEGVLIVDDAPVATPSRRGGGRKRAASPPVQERRKRARAKPLVSEEEEDEAEETAAATARPARRKGEDGEEEEGARPPRPVTPSPAVARPLLQLDAQEQKWQRAMDLAVQMLVPLKVDVKGLTLLPDGSTLECFRRGAQAWLNERKISCQLTFSTQKSLLTVMARFLLDFVVKAAGLKTPEWNPCGCVIWQHRSGSEGLHCLHGLPMINKEQLVEMDLNSENGQRALRETPERAKITTNRWGRNVVQLRNDGAMCCSHDVGSAPNTFSARSCGLFYSEGSKAQQAFEQLKAFQKACYPRMGNAETHLLMPLVCDCGWGCRQVPLLGRQTCKITPFALSGSAALNPQLVEDPKILASVTHPAVLVFQCYNPVYRGSRGNPQKNCDFKISAPDVMLALQLTKQMWAALMQTRPPLTVPEFKWGPQFQVQNTIFPVGTEDDDESLF

SEQ ID NO: 101 - protein, 432 aa, Bovine adenovirus B
MNRSGDLTRATSSADSSGDENPLVIDETPRKKVSRKRRAPIAEPPAEDVTAVKRAKIFKPSAPAAEAAAPALPAASRALLEADEVAWQRAMELAVGLCVPLKVDIKNLTLLPDTGTLECFRKVAQAWLNESKVYLPLTFSTQKTVLTIMGRFLYDFVLKVAGLGTTSWSPTGCVVWRHQCTEGGDGALHCLHGLPMLTKDQVIEMDVNSENGQRALKETPHKTKITTNRWNMNVVQLKNEDAACCHFDAALPAGSFTSKSCGMFFSEGPKALQAFWQIMTFQKACYPRMQSAGTHLLMPLKCDCNWGHSQLPLLGRQVCKITPFNINAGSAVDKSLVEDPKLLASVEHPSVLVFQCCNPVYRQTRANAQRNCDFKISAPDMISALQLVKQMWSALVKQSPPITIPEFRWDPQYQHQNVILPIDQYDADDSLF

SEQ ID NO: 102 - protein, 467 aa, Tree shrew adenovirus
MSDRHDYSSDSSSDMIICENEPAPKETQGPSVMRVGFSNPPVEIIRSGGGKTTHKSLGPNWRRKLPSLDQLMKGEPADESSQDSTKSSPEKRPSTSGEPAAIKKRRKAVVPNKLVSSDETKWQMVMDMAVNMLTPLKVDLKDLTMLADQGTLECFQKAAQAWMTERKIYTPLTYSTQKTLLSLMGRFLFHFIMTKVGESDHGGKAWPKNTNVSGAVVWKHQSGATLSCLHGLTMLNKEQIVEMDVSSENGQRALKETPEKTKITTNRWGRNVVQVRNEDAMCCQFDAPLPANNFSTKSCGMFYSEGEKAKTAFKQIMALQRACYPKMDGEQIVIPIKCDCNWASTTPLLGRQVCKVTPFTISATESIDRELVQDPKILATVHNPAVLVFQCCNPVYRNSRANPQKNCDWKISAPDVMTALQLAKQMWQHVFKEPPVVRIPEFKWSAAYQYQNTILPTGVDDTDDSLF

SEQ ID NO: 103 - protein, 529 aa, Human adenovirus 5
MASREEEQRETTPERGRGAARRPPTMEDVSSPSPSPPPPRAPPKKRMRRRIESEDEEDSSQDALVPRTPSPRPSTSAADLAIAPKKKKKRPSPKPERPPSPEVIVDSEEEREDVALQMVGFSNPPVLIKHGKGGKRTVRRLNEDDPVARGMRTQEEEEEPSEAESEITVMNPLSVPIVSAWEKGMEAARALMDKYHVDNDLKANFKLLPDQVEALAAVCKTWLNEEHRGLQLTFTSNKTFVTMMGRFLQAYLQSFAEVTYKHHEPTGCALWLHRCAEIEGELKCLHGSIMINKEHVIEMDVTSENGQRALKEQSSKAKIVKNRWGRNVVQISNTDARCCVHDAACPANQFSGKSCGMFFSEGAKAQVAFKQIKAFMQALYPNAQTGHGHLLMPLRCECNSKPGHAPFLGRQLPKLTPFALSNAEDLDADLISDKSVLASVHHPALIVFQCCNPVYRNSRAQGGGPNCDFKISAPDLLNALVMVRSLWSENFTELPRMVVPEFKWSTKHQYRNVSLPVAHSDARQNPFDF

SEQ ID NO: 104 - protein, 215 aa, Murine adenovirus 1
MSAPSPYVWTFQPQRGTAAGASQDYSTRINWLSAGPELRGKVVQLNEARNAILMKEQESVPTPRAEANPSFWPAALIFQPRPQAIPVHPAHPDTFDAALTSNGAQLAGGAWINYKNGSVRYEAPLQLAEEQVGGPLNAFAIKHQLQLAGGALSASMSEMSGAPRIPRSGGIGSWQFSREFPPTVYLNPFSGSPDTFPHQFLSNYDSFSHTVDGYD

SEQ ID NO: 105 - protein, 218 aa, Murine adenovirus 3
MSAPSPYMWTFQPQRGTAAGASQDYSTRLNWLSAGPSLRGKVIEVNQARNSILLNQQEAVPTPRRDINPPSWPASLIFHPRPKPIAVLPAHPDSFDPNVTLEGAQLAGGAWVRYKSGNEVRYTAPIQLAEEPTSRTPTAYALAQELQLAGGATATPPLMGELAGAPRVPRSGGIGSWQFTQEFPPTVYLNPYSGAPDTFPHQFLSNYDSVSQSVNGYD

SEQ ID NO: 106 - protein, 217 aa, Ovine adenovirus 7
MAQPVTPYVWKYQPETGYTAGAHQNYNTVINWLHANPQMFARIQHINTARNVMDKFRSDLTRDDIAVNINNWPAEDLMQPPNFPYIPATSKSASTINDWLATTQGIQLSGTSELNGWGSNRLTSYPDIPPILKYERPGQQLQGQGLFKQENIHLFYESPRLPRSGGLTPQQFVKEFPPVVYNNPFSESMSVFPKEFSPLFNPSESLKKTSSQTLQYK

SEQ ID NO: 107 - protein, 217 aa, Ovine adenovirus D; identical to SEQ ID NO: 106

SEQ ID NO: 108 - protein, 222 aa, Bovine adenovirus 4
MQPVTPYIWKYQPETGHTAGAHQDYGSVINWLQSNPQMFNRIRDINLQRNNIDQTQGLMTRDDLHSNINNWPASQVLQRQGFPYVPAKMNLEASKQDFIDSARGIQLSGPNPVFTGTGSNNLTSYPMLTENIPPLMLYHRPGQQLQGMGTISKENFHLLEEVSRVPRSGGLTPTEFLTQFPPIVYRHPFSSSLIYFPKEFDPLFSPHNDPRLTSSKTLQYVP

SEQ ID NO: 109 - protein, 250 aa, Duck adenovirus 1
MQPVTPYLWRYQPETGTAAGARQDYGAVINWFNSGPDLYRRIRDVNITRNNVEQTRALARTPLSGNFNRWTAAQLTHPPGTRYKPYFPVDSIKGARDRVATQQGQILAGAGYDLHDGRQYRKITRDALPFPHNWQVKDGSRWVNLGGKGANSLTTYPVIADIPPIMRYGRPGQQLQGSGFHRPSPALLTEEARVPRSHGMTVRQFVHEFPPVVFNHPFSEDITYFPKEFNPLFNPSEDYRVSSDRTLQYV

SEQ ID NO: 110 - protein, 278 aa, Snake adenovirus
MEAPVTPYIWQYQPETGTAAGARQNYGAVINWLSSDNNMYHRVQEVNRQRNKIDDFREQTVRADMAHSFNDWKPQQLSQPASTAYLPAPNPIAGPRTIPDVIFTAEGEQLAGASPSLLSGGASLPPSSYRLGDGREYRKFTRDAMPFPHNWLVKENGVWVPVEERDPLLSEEGRNALSSYPTLTYAQPPILRYRRLGQQLQGGGVVAPSSRVVSLLTEQPRMPRTEGMTPYQFSAEFPPVVYDHPFSRNLTLFPKEFSPLFDPKDQVLATSLATLQYR

SEQ ID NO: 111 - protein, 246 aa, Fowl adenovirus 10
MNLLNAAPTPYVWKYNPVTGKCAGANRTTAHYRLVLPGGNSFAYAADEIRRRFPEPAVTRAITARFEAESDQQPYAGPHETNIITADVVRSGPPPSAVYPFDPSGVQRVQLSGGMMGGRTEGRVQLSGGLTEGRMQLAGGAAGKLPTRARPTLRPPRWCGTTLTGNGLPADYPEMTPDAFKYYLRVQGPSQEVDEPGVMSQRQFMTTFLPAMVPHPFDSESPDAFPAYFSSVYKGTNGFEPVFWQG

SEQ ID NO: 112 - protein, 244 aa, Fowl adenovirus 8
MNLLEATPTEYVWKYNPLSGIPAGAQQNYGATINWVVPGGNSFAYAADEIRRHTLSPAATRAITERFEAESDQQPFANARETAYITANVLDSGFPKSAVYPVDPSGVQRVQLSGGAEGRMQLAGGLTEGRVQLSGGVLGHVVPPGGRRRAGGRPPRWCGTALAGNGLPEDAEVVSDTYKYFLRTQGPSQVVQEPGVYSRRQFMTTFLPAVVPRPFSSPNPRDFPAQYSAIYKGTNAYEDVFWDW

SEQ ID NO: 113 - protein, 241 aa, Fowl adenovirus 9
MNLLDATPTEYVWKYNPLSGIPAGAQQNYGATINWVVPGGNSFAYAADEIRRNTLSPAVTRAITARFEAESDQQPFANPRETAYITANVLDSGFPKSAVYPVDPSGVQKVQLAGGAEGRMQLSGGLTEGRVQLSGGVLGHVPRRSRRGARPPRWCGTALAGNGLPEDAEMVSDTYKYFLRTQGPSQVVSEPGVYSQRQFMTTFLPAVVPHPFDSPNPNDFPAQYSAIYKGTNAYEDVFWDW

SEQ ID NO: 114 - protein, 245 aa, Fowl adenovirus 1
MNLMNATPTEYVWKYNPVSGIPAGAQQNYGATIDWVLPGGTGFAIATNDIRRQTLNPAVTRAITARFEAESDQQPYASPHETNVIAANVLDSGYPKSGLYPLELSGNQRVQLAGGLMVGRTEGRMQLAGGLTEGRVQLSGGFHGRPLVRGRSRRPPRWCGAELTGNGLPEQAEVTSDTYKYFLRTQGPSQVVEEPGVFSQRQFMTTFLPSVVPHPFDSTNPGDFPAQYSAIYKGRTAFEDTFWDW

SEQ ID NO: 115 - protein, 200 aa, Turkey adenovirus 3
MDPVPLEYIWQYNPVTGRVGGANQNYGQRINVLHTNRYLYNRMQNVQKKSNERATERGLLSLKGGSTLPTIAEDEPAQLNSAIVRMAGLNDLNTVQAPDSSNLQNLANIALEAAEHNKATSSLLTTKKFVEEFPPVVYENPFSGSNFAYEFNPLYSPSGNEFSNPPFKFTGGAISLTGQHPVLSGGAVILSGQNPVLDKA

SEQ ID NO: 116 - protein, 200 aa, Avirulent turkey hemorrhagic enteritis virus; identical to SEQ ID NO: 115

SEQ ID NO: 117 - protein, 200 aa, Turkey adenovirus A; identical to SEQ ID NO: 115

SEQ ID NO: 118 - protein, 193 aa, Frog adenovirus 1
MEAEPSEYIWQYNPVTGRVVGASQNFGARINTLHASPQLWARMQQVQRRRNETVTLSALQGSGLVPATPSAFQTTDSSNCFLGGSDNWKELLEPVPESEENPNQALQDLLLAAESEKDQRNRNLTQSQFVSDFPPVVYERPFTGSDFPLEFSPLYSPDGNQFTNTGWISQSFPPNQSFPEIINHPTQHSSTTI

SEQ ID NO: 119 - protein, 221 aa, Porcine adenovirus 4
MPLAKEIPTPYVWSYQPQMGVPAGASQDYSTKINCLSAGPRMAQTVFALRDQRNRVLTAEAHGQTPRPVVNPASWPAAALSHEPPPPTLLTLPRNEPTEHAMTDAGYQIAGGAAPWSGVKTGSFCGRGLQLAEPPTTAIYPSGLFHLGRGQRLVLDHQPARTLLLESAPSVPRYGGIGARQFLKEFTPAVYPQPYSGPPNTFPDYFCFNYDSVSNSVDGYS

SEQ ID NO: 120 - protein, 198 aa, Bovine adenovirus 10
MSKEIPTPYVWNYQPQAGTAAGASQDYSTRLHWLSAGKSMISKVNTICENRNSILLSKGMQQLARLNANPPFTNRSQSVTALKLPRYEILEQRMSNSGMQLAGGSLSLAEPLCKQPLAPDGSFQLGGGAKVFSRGATNYAIRKTILLLEYSGGMGEKQFVKEFVPAVYFNPYSGLPASYPDQFISNYDAVTDSVDGYA

SEQ ID NO: 121 - protein, 216 aa, Bovine adenovirus 3
MSKEIPTPYVWTFQPQMGAAAGASQDYSTRMNWFSAGPDMIHDVNNIRDAQNRILMTQSAITATPRNLIDPRQWAAHLIKQPVVGTTHVEMPRNEVLEQHLTSHGAQIAGGGAAGDYFKSPTSARTLIPLTASCLRPDGVFQLGGGSRSSFNPLQTDFAFHALPSRPRHGGIGSRQFVEEFVPAVYLNPYSGPPDSYPDQFIRHYNVYSNSVSGYS

SEQ ID NO: 122 - protein, 227 aa, Tree shrew adenovirus
MSKDIPTPYVWTFQPQMGVAAGASQDYGTKMNWLSAGPSMIHRVNNIREARNRILLRQAALTETPRAVMNPPNWPSTLLYHDVAPPTSVPLPRNERLEIAMTNHGAQLAGGGHTSLPEGLKRELLFGSGIQLNEQLPVRPYGAAVRADGTFQLAGGSRSSFNPREELFLKLQSAPSQPRSGGIGSWQFVEEFVPAVYYNPFSGPPGTYPDQFISNYDVVSDSVDGYD

SEQ ID NO: 123 - protein, 221 aa, Bovine adenovirus 1
MSKDIPTPYVWTFQPQLGGCGASQDYSTRMNWLSAGPSMINQVNSVRADRNRILLRQAAVSETPRLVRNPPTWPAQYLFQPIGAPQTFELPRNESLEVAMSNSGMQLAGGGRRTKDIKPEDIVGRGLELNSDIPSASFLRPDGVFQLAGGSRSSFNPGLSTLLTVQPASSLPRSGGIGEVQFVHEFVPSVYFQPFSGPPGTYPDEFIYNYDIVSDSVDGYD

SEQ ID NO: 124 - protein, 223 aa, Ovine adenovirus A
MSKEIPTPHMWTFQPQLGQAAGASQDYSTRMNWLSAGPSMISQVDSIRAERNRILLHQAAVSATPRAIMNPPAWPASRLFQPVDTVQTLELPRNELLETAMTNSGMQLAGGGVHRTKDIKPEDLVGRGIQLNSYQPPTTRLKPERVFQLAGGSRSSFNPSINTLLTLQPAASVPRSGGIGEVQFVHEFVPSVYFQPFSGPPGSYPDEFIYNFDVATDSIDGYA

SEQ ID NO: 125 - protein, 224 aa, Canine adenovirus 2
MSKEIPTPYMWSYQPQTGHAAGASQDYSTQMNWFSAGPSMISQVYGIRDLRNKVLITQAEITKTPRTIMDPPIWPAAMLVQEAAPPKTVTLPRNHTLEQAMTNSGAQLAGGRQLCPSQIGIKSPVLAGTGIQLSEDIPSASWIRPDGIFQLGGGSRSSFSPTQAFLTLQQASSTPRAGGVGTYQFVREFVPEVYLNPFSGPPDTFPDQFIPNYDIVTNSVDGYD

SEQ ID NO: 126 - protein, 224 aa, Canine adenovirus 1
MSKEIPTPYIWSYQPQTGHAAGASQDYSTQMNWFSAGPSMISHVYGIRDLRNKVLMTQAQITKTPRTIMDPPIWPASMLVQKHATPKTIALPRNHTLEQAMVNCGAQLAGGRQPSPSHIDIKDTMLAGTGIQLGEDIPSVSWIRPDGIFQLGGGSRSSFSPTQAFLTLQQASSTPRTGGVGSYQFVREFVPEVYLNPFSGPPDTFPDQFIPNYDIVTNSVDGYD

SEQ ID NO: 127 - protein, 222 aa, Bat adenovirus TJM
MSKEIPTPYMWSFQPQSGHAAGAAQDYSTQMNWFSAGPSMINQVYQIRDLRNRILTTQAQITETPREVMNPPVWPAATIVQEAPPPTTVALPRNHALETAMTNSGIQLAGGRCLLPAARAACPIKGRGLQLSEDIPSASWIRPDGIFQLGGGSRSSFNPTQAFLTLQQASSQPRAGGIGTVQFVREFVPEVYLNPFSGPPDTFPDQFIPNYDIVTNSVDGYD

SEQ ID NO: 128 - protein, 223 aa, Porcine adenovirus 1
MSKQIPTPYMWSYQPQSGRAAGASVDYSTRMNWLSAGPSMIGQVNDIRHTRNQILIRQALITETPRPVQNPPSWPARLLPQMTQPPTHLHLPRNEILEGRLTDAGMQLAGGGALAPRDLYALTLRGRGIQLNEDLPFSASTLRPDGIFQLGGGGRSSFNPTDAYLTLQNSSSLPRSGGIGSDQFVREFVPTVYINPFSGPPGTYPDQFIANYNILTDSVAGYD

SEQ ID NO: 129 - protein, 223 aa, Porcine adenovirus 3
MSKQIPTPYMWSYQPQSGRAAGASVDYSTRMNWLSAGPSMIGQVNDIRHTRNQILIRQALITETPRPVQNPPSWPASLLPQMTQPPTHLHLPRNEILEGRLTDAGMQLAGGGALAPRDLYALTLRGRGIQLNEDLPLSASTLRPDGIFQLGGGGRSSFNPTDAYLTLQNSSSLPRSGGIGSEQFVREFVPTVYINPFSGPPGTYPDQFIANYNILTDSVAGYD

SEQ ID NO: 130 - protein, 227 aa, Simian adenovirus 22
MSKEIPTPYMWSYQPQMGLAAGAAQDYSTRMNWLSAGPAMISRVNDIRARRNQILLEQSAITATPRHHLNPRNWPAALVYQEIPQPTTVLLPRDAQAEVQLTNSGVQLAGGAALCRHRPAQGIKRLVIRGRGTQLNDEVVSSSLGLRPDGVFQLAGSGRSSFTPRQAVLTLESSSSQPRSGGIGTLQFVEEFTPSVYFNPFSGSPGHYPDEFIPNFDAISESVDGYD

SEQ ID NO: 131 - protein, 227 aa, Simian adenovirus 23
MSKEIPTPYMWSYQPQMGLAAGAAQDYSTRMNWLSAGPAMISRVNDIRAHRNQILLEQSAITATPRHHLNPRNWPAALVYQEIPQPTTVLLPRDAQAEVQLTNSGVQLAGGAALCRHRPAQGIKRLVIRGRGTQLNDEVVSSSLGLRPDGVFQLAGSGRSSFTPRQAVLTLESSSSQPRSGGIGTLQFVEEFTPSVYFNPFSGSPGHYPDEFIPNFDAISESVDGYD

SEQ ID NO: 132 - protein, 227 aa, Simian adenovirus 24; identical to SEQ ID NO: 131

SEQ ID NO: 133 - protein, 233 aa, Simian adenovirus 1
MSKEIPTPYMWSYQPQMGLAAGAAQDYSSKMNWLSAGPHMISRVNGIRAHRNQILLEQAAITATPRRQLNPPSWPAAQVYQENPRPTTVLLPRDAEAEVLMTNSGVQLAGGSRYARYRGRAAPYSPGSIKRVIIRGRGIQLNDETVSSSTGLRPDGVFQLGGAGRSSFTTRQAYLTLQSSSSQPRSGGIGTLQFVEEFVPSVYFNPFSGSPGRYPDAFIPNFDAVSESVDGYD

SEQ ID NO: 134 - protein, 233 aa, Simian adenovirus 7
MSKEIPTPYMWSYQPQMGLAAGAAQDYSSKMNWLSAGPHMISRVNGIRAHRNQILLEQAAITATPRRQLNPPSWPAAQVYQETPRPTTVLLPRDAEAEVLMTNSGVQLAGGSRYARYRGRAAPYSPGSIKRVIIRGRGIQLNDEAVSSSTGLRPDGVFQLGGAGRSSFTTRQAYLTLQSSSSQPRSGGIGTLQFVEEFVPSVYFNPFSGSPGRYPDAFIPNFDAVSESVDGYD

SEQ ID NO: 135 - protein, 227 aa, Human adenovirus 5
MSKEIPTPYMWSYQPQMGLAAGAAQDYSTRINYMSAGPHMISRVNGIRAHRNRILLEQAAITTTPRNNLNPRSWPAALVYQESPAPTTVVLPRDAQAEVQMTNSGAQLAGGFRHRVRSPGQGITHLTIRGRGIQLNDESVSSSLGLRPDGTFQIGGAGRPSFTPRQAILTLQTSSSEPRSGGIGTLQFIEEFVPSVYFNPFSGPPGHYPDQFIPNFDAVKDSADGYD

SEQ ID NO: 136 - protein, 951 aa, Human adenovirus 5
MATPSMMPQWSYMHISGQDASEYLSPGLVQFARATETYFSLNNKFRNPTVAPTHDVTTDRSQRLTLRFIPVDREDTAYSYKARFTLAVGDNRVLDMASTYFDIRGVLDRGPTFKPYSGTAYNALAPKGAPNPCEWDEAATALEINLEEEDDDNEDEVDEQAEQQKTHVFGQAPYSGINITKEGIQIGVEGQTPKYADKTFQPEPQIGESQWYETEINHAAGRVLKKTTPMKPCYGSYAKPTNENGGQGILVKQQNGKLESQVEMQFFSTTEAAAGNGDNLTPKVVLYSEDVDIETPDTHISYMPTIKEGNSRELMGQQSMPNRPNYIAFRDNFIGLMYYNSTGNMGVLAGQASQLNAVVDLQDRNTELSYQLLLDSIGDRTRYFSMWNQAVDSYDPDVRIIENHGTEDELPNYCFPLGGVINTETLTKVKPKTGQENGWEKDATEFSDKNEIRVGNNFAMEINLNANLWRNFLYSNIALYPDKLKYSPSNVKISDNPNTYDYMNKRVVAPGLVDCYINLGARWSLDYMDNVNPFNHHRNAGLRYRSMLLGNGRYVPFHIQVPQKFFAIKNLLLLPGSYTYEWNFRKDVNMVLQSSLGNDLRVDGASIKFDSICLYATFFPMAHNTASTLEAMLRNDTNDQSFNDYLSAANMLYPIPANATNVPISIPSRNWAAFRGWAFTRLKTKETPSLGSGYDPYYTYSGSIPYLDGTFYLNHTFKKVAITFDSSVSWPGNDRLLTPNEFEIKRSVDGEGYNVAQCNMTKDWFLVQMLANYNIGYQGFYIPESYKDRMYSFFRNFQPMSRQVVDDTKYKDYQQVGILHQHNNSGFVGYLAPTMREGQAYPANFPYPLIGKTAVDSITQKKFLCDRTLWRIPFSSNFMSMGALTDLGQNLLYANSAHALDMTFEVDPMDEPTLLYVLFEVFDVVRVHQPHRGVIETVYLRTPFSAGNATT

SEQ ID NO: 137 - DNA, 35938 bp, Human adenovirus 5
catcatcaataatataccttattttggattgaagccaatatgataatgagggggtggagtttgtgacgtggcgcggggcgtgggaacggggcgggtgacgtagtagtgtggcggaagtgtgatgttgcaagtgtggcggaacacatgtaagcgacggatgtggcaaaagtgacgtttttggtgtgcgccggtgtacacaggaagtgacaattttcgcgcggttttaggcggatgttgtagtaaatttgggcgtaaccgagtaagatttggccattttcgcgggaaaactgaataagaggaagtgaaatctgaataattttgtgttactcatagcgcgtaatatttgtctagggccgcggggactttgaccgtttacgtggagactcgcccaggtgtttttctcaggtgttttccgcgttccgggtcaaagttggcgttttattattatagtcagctgacgtgtagtgtatttatacccggtgagttcctcaagaggccactcttgagtgccagcgagtagagttttctcctccgagccgctccgacaccgggactgaaaatgagacatattatctgccacggaggtgttattaccgaagaaatggccgccagtcttttggaccagctgatcgaagaggtactggctgataatcttccacctcctagccattttgaaccacctacccttcacgaactgtatgatttagacgtgacggcccccgaagatcccaacgaggaggcggtttcgcagatttttcccgactctgtaatgttggcggtgcaggaagggattgacttactcacttttccgccggcgcccggttctccggagccgcctcacctttcccggcagcccgagcagccggagcagagagccttgggtccggtttctatgccaaaccttgtaccggaggtgatcgatcttacctgccacgaggctggctttccacccagtgacgacgaggatgaagagggtgaggagtttgtgttagattatgtggagcaccccgggcacggttgcaggtcttgtcattatcaccggaggaatacgggggacccagatattatgtgttcgctttgctatatgaggacctgtggcatgtttgtctacagtaagtgaaaattatgggcagtgggtgatagagtggtgggtttggtgtggtaattttttttttaatttttacagttttgtggtttaaagaattttgtattgtgatttttttaaaaggtcctgtgtctgaacctgagcctgagcccgagccagaaccggagcctgcaagacctacccgccgtcctaaaatggcgcctgctatcctgagacgcccgacatcacctgtgtctagagaatgcaatagtagtacggatagctgtgactccggtccttctaacacacctcctgagatacacccggtggtcccgctgtgccccattaaaccagttgccgtgagagttggtgggcgtcgccaggctgtggaatgtatcgaggacttgcttaacgagcctgggcaacctttggacttgagctgtaaacgccccaggccataaggtgtaaacctgtgattgcgtgtgtggttaacgcctttgtttgctgaatgagttgatgtaagtttaataaagggtgagataatgtttaacttgcatggcgtgttaaatggggcggggcttaaagggtatataatgcgccgtgggctaatcttggttacatctgacctcatggaggcttgggagtgtttggaagatttttctgctgtgcgtaacttgctggaacagagctctaacagtacctcttggttttggaggtttctgtggggctcatcccaggcaaagttagtctgcagaattaaggaggattacaagtgggaatttgaagagcttttgaaatcctgtggtgagctgtttgattctttgaatctgggtcaccaggcgcttttccaagagaaggtcatcaagactttggatttttccacaccggggcgcgctgcggctgctgttgcttttttgagttttataaaggataaatggagcgaagaaacccatctgagcggggggtacctgctggattttctggccatgcatctgtggagagcggttgtgagacacaagaatcgcctgctactgttgtcttccgtccgcccggcgataataccgacggaggagcagcagcagcagcaggaggaagccaggcggcggcggcaggagcagagcccatggaacccgagagccggcctggaccctcgggaatgaatgttgtacaggtggctgaactgtatccagaactgagacgcattttgacaattacagaggatgggcaggggctaaagggggtaaagagggagcggggggcttgtgaggctacagaggaggctaggaatctagcttttagcttaatgaccagacaccgtcctgagtgtattacttttcaacagatcaaggataattgcgctaatgagcttgatctgctggcgcagaagtattccatagagcagctgaccacttactggctgcagccaggggatgattttgaggaggctattagggtatatgcaaaggtggcacttaggccagattgcaagtacaagatcagcaaacttgtaaatatcaggaattgttgctacatttctgggaacggggccgaggtggagatagatacggaggatagggtggcctttagatgtagcatgataaatatgtggccgggggtgcttggcatggacggggtggttattatgaatgtaaggtttactggccccaattttagcggtacggttttcctggccaataccaaccttatcctacacggtgtaagcttctatgggtttaacaatacctgtgtggaagcctggaccgatgtaagggttcggggctgtgccttttactgctgctggaagggggtggtgtgtcgccccaaaagcagggcttcaattaagaaatgcctctttgaaaggtgtaccttgggtatcctgtctgagggtaactccagggtgcgccacaatgtggcctccgactgtggttgcttcatgctagtgaaaagcgtggctgtgattaagcataacatggtatgtggcaactgcgaggacagggcctctcagatgctgacctgctcggacggcaactgtcacctgctgaagaccattcacgtagccagccactctcgcaaggcctggccagtgtttgagcataacatactgacccgctgttccttgcatttgggtaacaggaggggggtgttcctaccttaccaatgcaatttgagtcacactaagatattgcttgagcccgagagcatgtccaaggtgaacctgaacggggtgtttgacatgaccatgaagatctggaaggtgctgaggtacgatgagacccgcaccaggtgcagaccctgcgagtgtggcggtaaacatattaggaaccagcctgtgatgctggatgtgaccgaggagctgaggcccgatcacttggtgctggcctgcacccgcgctgagtttggctctagcgatgaagatacagattgaggtactgaaatgtgtgggcgtggcttaagggtgggaaagaatatataaggtgggggtcttatgtagttttgtatctgttttgcagcagccgccgccgccatgagcaccaactcgtttgatggaagcattgtgagctcatatttgacaacgcgcatgcccccatgggccggggtgcgtcagaatgtgatgggctccagcattgatggtcgccccgtcctgcccgcaaactctactaccttgacctacgagaccgtgtctggaacgccgttggagactgcagcctccgccgccgcttcagccgctgcagccaccgcccgcgggattgtgactgactttgctttcctgagcccgcttgcaagcagtgcagcttcccgttcatccgcccgcgatgacaagttgacggctcttttggcacaattggattctttgacccgggaacttaatgtcgtttctcagcagctgttggatctgcgccagcaggtttctgccctgaaggcttcctcccctcccaatgcggtttaaaacataaataaaaaaccagactctgtttggatttggatcaagcaagtgtcttgctgtctttatttaggggttttgcgcgcgcggtaggcccgggaccagcggtctcggtcgttgagggtcctgtgtattttttccaggacgtggtaaaggtgactctggatgttcagatacatgggcataagcccgtctctggggtggaggtagcaccactgcagagcttcatgctgcggggtggtgttgtagatgatccagtcgtagcaggagcgctgggcgtggtgcctaaaaatgtctttcagtagcaagctgattgccaggggcaggcccttggtgtaagtgtttacaaagcggttaagctgggatgggtgcatacgtggggatatgagatgcatcttggactgtatttttaggttggctatgttcccagccatatccctccggggattcatgttgtgcagaaccaccagcacagtgtatccggtgcacttgggaaatttgtcatgtagcttagaaggaaatgcgtggaagaacttggagacgcccttgtgacctccaagattttccatgcattcgtccataatgatggcaatgggcccacgggcggcggcctgggcgaagatatttctgggatcactaacgtcatagttgtgttccaggatgagatcgtcataggccatttttacaaagcgcgggcggagggtgccagactgcggtataatggttccatccggcccaggggcgtagttaccctcacagatttgcatttcccacgctttgagttcagatggggggatcatgtctacctgcggggcgatgaagaaaacggtttccggggtaggggagatcagctgggaagaaagcaggttcctgagcagctgcgacttaccgcagccggtgggcccgtaaatcacacctattaccgggtgcaactggtagttaagagagctgcagctgccgtcatccctgagcaggggggccacttcgttaagcatgtccctgactcgcatgttttccctgaccaaatccgccagaaggcgctcgccgcccagcgatagcagttcttgcaaggaagcaaagtttttcaacggtttgagaccgtccgccgtaggcatgcttttgagcgtttgaccaagcagttccaggcggtcccacagctcggtcacctgctctacggcatctcgatccagcatatctcctcgtttcgcgggttggggcggctttcgctgtacggcagtagtcggtgctcgtccagacgggccagggtcatgtctttccacgggcgcagggtcctcgtcagcgtagtctgggtcacggtgaaggggtgcgctccgggctgcgcgctggccagggtgcgcttgaggctggtcctgctggtgctgaagcgctgccggtcttcgccctgcgcgtcggccaggtagcatttgaccatggtgtcatagtccagcccctccgcggcgtggcccttggcgcgcagcttgcccttggaggaggcgccgcacgaggggcagtgcagacttttgagggcgtagagcttgggcgcgagaaataccgattccggggagtaggcatccgcgccgcaggccccgcagacggtctcgcattccacgagccaggtgagctctggccgttcggggtcaaaaaccaggtttcccccatgctttttgatgcgtttcttacctctggtttccatgagccggtgtccacgctcggtgacgaaaaggctgtccgtgtccccgtatacagacttgagaggcctgtcctcgagcggtgttccgcggtcctcctcgtatagaaactcggaccactctgagacaaaggctcgcgtccaggccagcacgaaggaggctaagtgggaggggtagcggtcgttgtccactagggggtccactcgctccagggtgtgaagacacatgtcgccctcttcggcatcaaggaaggtgattggtttgtaggtgtaggccacgtgaccgggtgttcctgaaggggggctataaaagggggtgggggcgcgttcgtcctcactctcttccgcatcgctgtctgcgagggccagctgttggggtgagtactccctctgaaaagcgggcatgacttctgcgctaagattgtcagtttccaaaaacgaggaggatttgatattcacctggcccgcggtgatgcctttgagggtggccgcatccatctggtcagaaaagacaatctttttgttgtcaagcttggtggcaaacgacccgtagagggcgttggacagcaacttggcgatggagcgcagggtttggtttttgtcgcgatcggcgcgctccttggccgcgatgtttagctgcacgtattcgcgcgcaacgcaccgccattcgggaaagacggtggtgcgctcgtcgggcaccaggtgcacgcgccaaccgcggttgtgcagggtgacaaggtcaacgctggtggctacctctccgcgtaggcgctcgttggtccagcagaggcggccgcccttgcgcgagcagaatggcggtagggggtctagctgcgtctcgtccggggggtctgcgtccacggtaaagaccccgggcagcaggcgcgcgtcgaagtagtctatcttgcatccttgcaagtctagcgcctgctgccatgcgcgggcggcaagcgcgcgctcgtatgggttgagtgggggaccccatggcatggggtgggtgagcgcggaggcgtacatgccgcaaatgtcgtaaacgtagaggggctctctgagtattccaagatatgtagggtagcatcttccaccgcggatgctggcgcgcacgtaatcgtatagttcgtgcgagggagcgaggaggtcgggaccgaggttgctacgggcgggctgctctgctcggaagactatctgcctgaagatggcatgtgagttggatgatatggttggacgctggaagacgttgaagctggcgtctgtgagacctaccgcgtcacgcacgaaggaggcgtaggagtcgcgcagcttgttgaccagctcggcggtgacctgcacgtctagggcgcagtagtccagggtttccttgatgatgtcatacttatcctgtcccttttttttccacagctcgcggttgaggacaaactcttcgcggtctttccagtactcttggatcggaaacccgtcggcctccgaacggtaagagcctagcatgtagaactggttgacggcctggtaggcgcagcatcccttttctacgggtagcgcgtatgcctgcgcggccttccggagcgaggtgtgggtgagcgcaaaggtgtccctgaccatgactttgaggtactggtatttgaagtcagtgtcgtcgcatccgccctgctcccagagcaaaaagtccgtgcgctttttggaacgcggatttggcagggcgaaggtgacatcgttgaagagtatctttcccgcgcgaggcataaagttgcgtgtgatgcggaagggtcccggcacctcggaacggttgttaattacctgggcggcgagcacgatctcgtcaaagccgttgatgttgtggcccacaatgtaaagttccaagaagcgcgggatgcccttgatggaaggcaattttttaagttcctcgtaggtgagctcttcaggggagctgagcccgtgctctgaaagggcccagtctgcaagatgagggttggaagcgacgaatgagctccacaggtcacgggccattagcatttgcaggtggtcgcgaaaggtcctaaactggcgacctatggccattttttctggggtgatgcagtagaaggtaagcgggtcttgttcccagcggtcccatccaaggttcgcggctaggtctcgcgcggcagtcactagaggctcatctccgccgaacttcatgaccagcatgaagggcacgagctgcttcccaaaggcccccatccaagtataggtctctacatcgtaggtgacaaagagacgctcggtgcgaggatgcgagccgatcgggaagaactggatctcccgccaccaattggaggagtggctattgatgtggtgaaagtagaagtccctgcgacgggccgaacactcgtgctggcttttgtaaaaacgtgcgcagtactggcagcggtgcacgggctgtacatcctgcacgaggttgacctgacgaccgcgcacaaggaagcagagtgggaatttgagcccctcgcctggcgggtttggctggtggtcttctacttcggctgcttgtccttgaccgtctggctgctcgaggggagttacggtggatcggaccaccacgccgcgcgagcccaaagtccagatgtccgcgcgcggcggtcggagcttgatgacaacatcgcgcagatgggagctgtccatggtctggagctcccgcggcgtcaggtcaggcgggagctcctgcaggtttacctcgcatagacgggtcagggcgcgggctagatccaggtgatacctaatttccaggggctggttggtggcggcgtcgatggcttgcaagaggccgcatccccgcggcgcgactacggtaccgcgcggcgggcggtgggccgcgggggtgtccttggatgatgcatctaaaagcggtgacgcgggcgagcccccggaggtagggggggctccggacccgccgggagagggggcaggggcacgtcggcgccgcgcgcgggcaggagctggtgctgcgcgcgtaggttgctggcgaacgcgacgacgcggcggttgatctcctgaatctggcgcctctgcgtgaagacgacgggcccggtgagcttgagcctgaaagagagttcgacagaatcaatttcggtgtcgttgacggcggcctggcgcaaaatctcctgcacgtctcctgagttgtcttgataggcgatctcggccatgaactgctcgatctcttcctcctggagatctccgcgtccggctcgctccacggtggcggcgaggtcgttggaaatgcgggccatgagctgcgagaaggcgttgaggcctccctcgttccagacgcggctgtagaccacgcccccttcggcatcgcgggcgcgcatgaccacctgcgcgagattgagctccacgtgccgggcgaagacggcgtagtttcgcaggcgctgaaagaggtagttgagggtggtggcggtgtgttctgccacgaagaagtacataacccagcgtcgcaacgtggattcgttgatatcccccaaggcctcaaggcgctccatggcctcgtagaagtccacggcgaagttgaaaaactgggagttgcgcgccgacacggttaactcctcctccagaagacggatgagctcggcgacagtgtcgcgcacctcgcgctcaaaggctacaggggcctcttcttcttcttcaatctcctcttccataagggcctccccttcttcttcttctggcggcggtgggggaggggggacacggcggcgacgacggcgcaccgggaggcggtcgacaaagcgctcgatcatctccccgcggcgacggcgcatggtctcggtgacggcgcggccgttctcgcgggggcgcagttggaagacgccgcccgtcatgtcccggttatgggttggcggggggctgccatgcggcagggatacggcgctaacgatgcatctcaacaattgttgtgtaggtactccgccgccgagggacctgagcgagtccgcatcgaccggatcggaaaacctctcgagaaaggcgtctaaccagtcacagtcgcaaggtaggctgagcaccgtggcgggcggcagcgggcggcggtcggggttgtttctggcggaggtgctgctgatgatgtaattaaagtaggcggtcttgagacggcggatggtcgacagaagcaccatgtccttgggtccggcctgctgaatgcgcaggcggtcggccatgccccaggcttcgttttgacatcggcgcaggtctttgtagtagtcttgcatgagcctttctaccggcacttcttcttctccttcctcttgtcctgcatctcttgcatctatcgctgcggcggcggcggagtttggccgtaggtggcgccctcttcctcccatgcgtgtgaccccgaagcccctcatcggctgaagcagggctaggtcggcgacaacgcgctcggctaatatggcctgctgcacctgcgtgagggtagactggaagtcatccatgtccacaaagcggtggtatgcgcccgtgttgatggtgtaagtgcagttggccataacggaccagttaacggtctggtgacccggctgcgagagctcggtgtacctgagacgcgagtaagccctcgagtcaaatacgtagtcgttgcaagtccgcaccaggtactggtatcccaccaaaaagtgcggcggcggctggcggtagaggggccagcgtagggtggccggggctccgggggcgagatcttccaacataaggcgatgatatccgtagatgtacctggacatccaggtgatgccggcggcggtggtggaggcgcgcggaaagtcgcggacgcggttccagatgttgcgcagcggcaaaaagtgctccatggtcgggacgctctggccggtcaggcgcgcgcaatcgttgacgctctagaccgtgcaaaaggagagcctgtaagcgggcactcttccgtggtctggtggataaattcgcaagggtatcatggcggacgaccggggttcgagccccgtatccggccgtccgccgtgatccatgcggttaccgcccgcgtgtcgaacccaggtgtgcgacgtcagacaacgggggagtgctccttttggcttccttccaggcgcggcggctgctgcgctagcttttttggccactggccgcgcgcagcgtaagcggttaggctggaaagcgaaagcattaagtggctcgctccctgtagccggagggttattttccaagggttgagtcgcgggacccccggttcgagtctcggaccggccggactgcggcgaacgggggtttgcctccccgtcatgcaagaccccgcttgcaaattcctccggaaacagggacgagccccttttttgcttttcccagatgcatccggtgctgcggcagatgcgcccccctcctcagcagcggcaagagcaagagcagcggcagacatgcagggcaccctcccctcctcctaccgcgtcaggaggggcgacatccgcggttgacgcggcagcagatggtgattacgaacccccgcggcgccgggcccggcactacctggacttggaggagggcgagggcctggcgcggctaggagcgccctctcctgagcggtacccaagggtgcagctgaagcgtgatacgcgtgaggcgtacgtgccgcggcagaacctgtttcgcgaccgcgagggagaggagcccgaggagatgcgggatcgaaagttccacgcagggcgcgagctgcggcatggcctgaatcgcgagcggttgctgcgcgaggaggactttgagcccgacgcgcgaaccgggattagtcccgcgcgcgcacacgtggcggccgccgacctggtaaccgcatacgagcagacggtgaaccaggagattaactttcaaaaaagctttaacaaccacgtgcgtacgcttgtggcgcgcgaggaggtggctataggactgatgcatctgtgggactttgtaagcgcgctggagcaaaacccaaatagcaagccgctcatggcgcagctgttccttatagtgcagcacagcagggacaacgaggcattcagggatgcgctgctaaacatagtagagcccgagggccgctggctgctcgatttgataaacatcctgcagagcatagtggtgcaggagcgcagcttgagcctggctgacaaggtggccgccatcaactattccatgcttagcctgggcaagttttacgcccgcaagatataccataccccttacgttcccatagacaaggaggtaaagatcgaggggttctacatgcgcatggcgctgaaggtgcttaccttgagcgacgacctgggcgtttatcgcaacgagcgcatccacaaggccgtgagcgtgagccggcggcgcgagctcagcgaccgcgagctgatgcacagcctgcaaagggccctggctggcacgggcagcggcgatagagaggccgagtcctactttgacgcgggcgctgacctgcgctgggccccaagccgacgcgccctggaggcagctggggccggacctgggctggcggtggcacccgcgcgcgctggcaacgtcggcggcgtggaggaatatgacgaggacgatgagtacgagccagaggacggcgagtactaagcggtgatgtttctgatcagatgatgcaagacgcaacggacccggcggtgcgggcggcgctgcagagccagccgtccggccttaactccacggacgactggcgccaggtcatggaccgcatcatgtcgctgactgcgcgcaatcctgacgcgttccggcagcagccgcaggccaaccggctctccgcaattctggaagcggtggtcccggcgcgcgcaaaccccacgcacgagaaggtgctggcgatcgtaaacgcgctggccgaaaacagggccatccggcccgacgaggccggcctggtctacgacgcgctgcttcagcgcgtggctcgttacaacagcggcaacgtgcagaccaacctggaccggctggtgggggatgtgcgcgaggccgtggcgcagcgtgagcgcgcgcagcagcagggcaacctgggctccatggttgcactaaacgccttcctgagtacacagcccgccaacgtgccgcggggacaggaggactacaccaactttgtgagcgcactgcggctaatggtgactgagacaccgcaaagtgaggtgtaccagtctgggccagactattttttccagaccagtagacaaggcctgcagaccgtaaacctgagccaggctttcaaaaacttgcaggggctgtggggggtgcgggctcccacaggcgaccgcgcgaccgtgtctagcttgctgacgcccaactcgcgcctgttgctgctgctaatagcgcccttcacggacagtggcagcgtgtcccgggacacatacctaggtcacttgctgacactgtaccgcgaggccataggtcaggcgcatgtggacgagcatactttccaggagattacaagtgtcagccgcgcgctggggcaggaggacacgggcagcctggaggcaaccctaaactacctgctgaccaaccggcggcagaagatcccctcgttgcacagtttaaacagcgaggaggagcgcattttgcgctacgtgcagcagagcgtgagccttaacctgatgcgcgacggggtaacgcccagcgtggcgctggacatgaccgcgcgcaacatggaaccgggcatgtatgcctcaaaccggccgtttatcaaccgcctaatggactacttgcatcgcgcggccgccgtgaaccccgagtatttcaccaatgccatcttgaacccgcactggctaccgccccctggtttctacaccgggggattcgaggtgcccgagggtaacgatggattcctctgggacgacatagacgacagcgtgttttccccgcaaccgcagaccctgctagagttgcaacagcgcgagcaggcagaggcggcgctgcgaaaggaaagcttccgcaggccaagcagcttgtccgatctaggcgctgcggccccgcggtcagatgctagtagcccatttccaagcttgatagggtctcttaccagcactcgcaccacccgcccgcgcctgctgggcgaggaggagtacctaaacaactcgctgctgcagccgcagcgcgaaaaaaacctgcctccggcatttcccaacaacgggatagagagcctagtggacaagatgagtagatggaagacgtacgcgcaggagcacagggacgtgccaggcccgcgcccgcccacccgtcgtcaaaggcacgaccgtcagcggggtctggtgtgggaggacgatgactcggcagacgacagcagcgtcctggatttgggagggagtggcaacccgtttgcgcaccttcgccccaggctggggagaatgttttaaaaaaaaaaaagcatgatgcaaaataaaaaactcaccaaggccatggcaccgagcgttggttttcttgtattccccttagtatgcggcgcgcggcgatgtatgaggaaggtcctcctccctcctacgagagtgtggtgagcgcggcgccagtggcggcggcgctgggttctcccttcgatgctcccctggacccgccgtttgtgcctccgcggtacctgcggcctaccggggggagaaacagcatccgttactctgagttggcacccctattcgacaccacccgtgtgtacctggtggacaacaagtcaacggatgtggcatccctgaactaccagaacgaccacagcaactttctgaccacggtcattcaaaacaatgactacagcccgggggaggcaagcacacagaccatcaatcttgacgaccggtcgcactggggcggcgacctgaaaaccatcctgcataccaacatgccaaatgtgaacgagttcatgtttaccaataagtttaaggcgcgggtgatggtgtcgcgcttgcctactaaggacaatcaggtggagctgaaatacgagtgggtggagttcacgctgcccgagggcaactactccgagaccatgaccatagaccttatgaacaacgcgatcgtggagcactacttgaaagtgggcagacagaacggggttctggaaagcgacatcggggtaaagtttgacacccgcaacttcagactggggtttgaccccgtcactggtcttgtcatgcctggggtatatacaaacgaagccttccatccagacatcattttgctgccaggatgcggggtggacttcacccacagccgcctgagcaacttgttgggcatccgcaagcggcaacccttccaggagggctttaggatcacctacgatgatctggagggtggtaacattcccgcactgttggatgtggacgcctaccaggcgagcttgaaagatgacaccgaacagggcgggggtggcgcaggcggcagcaacagcagtggcagcggcgcggaagagaactccaacgcggcagccgcggcaatgcagccggtggaggacatgaacgatcatgccattcgcggcgacacctttgccacacgggctgaggagaagcgcgctgaggccgaagcagcggccgaagctgccgcccccgctgcgcaacccgaggtcgagaagcctcagaagaaaccggtgatcaaacccctgacagaggacagcaagaaacgcagttacaacctaataagcaatgacagcaccttcacccagtaccgcagctggtaccttgcatacaactacggcgaccctcagaccggaatccgctcatggaccctgctttgcactcctgacgtaacctgcggctcggagcaggtctactggtcgttgccagacatgatgcaagaccccgtgaccttccgctccacgcgccagatcagcaactttccggtggtgggcgccgagctgttgcccgtgcactccaagagcttctacaacgaccaggccgtctactcccaactcatccgccagtttacctctctgacccacgtgttcaatcgctttcccgagaaccagattttggcgcgcccgccagcccccaccatcaccaccgtcagtgaaaacgttcctgctctcacagatcacgggacgctaccgctgcgcaacagcatcggaggagtccagcgagtgaccattactgacgccagacgccgcacctgcccctacgtttacaaggccctgggcatagtctcgccgcgcgtcctatcgagccgcactttttgagcaagcatgtccatccttatatcgcccagcaataacacaggctggggcctgcgcttcccaagcaagatgtttggcggggccaagaagcgctccgaccaacacccagtgcgcgtgcgcgggcactaccgcgcgccctggggcgcgcacaaacgcggccgcactgggcgcaccaccgtcgatgacgccatcgacgcggtggtggaggaggcgcgcaactacacgcccacgccgccaccagtgtccacagtggacgcggccattcagaccgtggtgcgcggagcccggcgctatgctaaaatgaagagacggcggaggcgcgtagcacgtcgccaccgccgccgacccggcactgccgcccaacgcgcggcggcggccctgcttaaccgcgcacgtcgcaccggccgacgggcggccatgcgggccgctcgaaggctggccgcgggtattgtcactgtgccccccaggtccaggcgacgagcggccgccgcagcagccgcggccattagtgctatgactcagggtcgcaggggcaacgtgtattgggtgcgcgactcggttagcggcctgcgcgtgcccgtgcgcacccgccccccgcgcaactagattgcaagaaaaaactacttagactcgtactgttgtatgtatccagcggcggcggcgcgcaacgaagctatgtccaagcgcaaaatcaaagaagagatgctccaggtcatcgcgccggagatctatggccccccgaagaaggaagagcaggattacaagccccgaaagctaaagcgggtcaaaaagaaaaagaaagatgatgatgatgaacttgacgacgaggtggaactgctgcacgctaccgcgcccaggcgacgggtacagtggaaaggtcgacgcgtaaaacgtgttttgcgacccggcaccaccgtagtctttacgcccggtgagcgctccacccgcacctacaagcgcgtgtatgatgaggtgtacggcgacgaggacctgcttgagcaggccaacgagcgcctcggggagtttgcctacggaaagcggcataaggacatgctggcgttgccgctggacgagggcaacccaacacctagcctaaagcccgtaacactgcagcaggtgctgcccgcgcttgcaccgtccgaagaaaagcgcggcctaaagcgcgagtctggtgacttggcacccaccgtgcagctgatggtacccaagcgccagcgactggaagatgtcttggaaaaaatgaccgtggaacctgggctggagcccgaggtccgcgtgcggccaatcaagcaggtggcgccgggactgggcgtgcagaccgtggacgttcagatacccactaccagtagcaccagtattgccaccgccacagagggcatggagacacaaacgtccccggttgcctcagcggtggcggatgccgcggtgcaggcggtcgctgcggccgcgtccaagacctctacggaggtgcaaacggacccgtggatgtttcgcgtttcagccccccggcgcccgcgcggttcgaggaagtacggcgccgccagcgcgctactgcccgaatatgccctacatccttccattgcgcctacccccggctatcgtggctacacctaccgccccagaagacgagcaactacccgacgccgaaccaccactggaacccgccgccgccgtcgccgtcgccagcccgtgctggccccgatttccgtgcgcagggtggctcgcgaaggaggcaggaccctggtgctgccaacagcgcgctaccaccccagcatcgtttaaaagccggtctttgtggttcttgcagatatggccctcacctgccgcctccgtttcccggtgccgggattccgaggaagaatgcaccgtaggaggggcatggccggccacggcctgacgggcggcatgcgtcgtgcgcaccaccggcggcggcgcgcgtcgcaccgtcgcatgcgcggcggtatcctgcccctccttattccactgatcgccgcggcgattggcgccgtgcccggaattgcatccgtggccttgcaggcgcagagacactgattaaaaacaagttgcatgtggaaaaatcaaaataaaaagtctggactctcacgctcgcttggtcctgtaactattttgtagaatggaagacatcaactttgcgtctctggccccgcgacacggctcgcgcccgttcatgggaaactggcaagatatcggcaccagcaatatgagcggtggcgccttcagctggggctcgctgtggagcggcattaaaaatttcggttccaccgttaagaactatggcagcaaggcctggaacagcagcacaggccagatgctgagggataagttgaaagagcaaaatttccaacaaaaggtggtagatggcctggcctctggcattagcggggtggtggacctggccaaccaggcagtgcaaaataagattaacagtaagcttgatccccgccctcccgtagaggagcctccaccggccgtggagacagtgtctccagaggggcgtggcgaaaagcgtccgcgccccgacagggaagaaactctggtgacgcaaatagacgagcctccctcgtacgaggaggcactaaagcaaggcctgcccaccacccgtcccatcgcgcccatggctaccggagtgctgggccagcacacacccgtaacgctggacctgcctccccccgccgacacccagcagaaacctgtgctgccaggcccgaccgccgttgttgtaacccgtcctagccgcgcgtccctgcgccgcgccgccagcggtccgcgatcgttgcggcccgtagccagtggcaactggcaaagcacactgaacagcatcgtgggtctgggggtgcaatccctgaagcgccgacgatgcttctgaatagctaacgtgtcgtatgtgtgtcatgtatgcgtccatgtcgccgccagaggagctgctgagccgccgcgcgcccgctttccaagatggctaccccttcgatgatgccgcagtggtcttacatgcacatctcgggccaggacgcctcggagtacctgagccccgggctggtgcagtttgcccgcgccaccgagacgtacttcagcctgaataacaagtttagaaaccccacggtggcgcctacgcacgacgtgaccacagaccggtcccagcgtttgacgctgcggttcatccctgtggaccgtgaggatactgcgtactcgtacaaggcgcggttcaccctagctgtgggtgataaccgtgtgctggacatggcttccacgtactttgacatccgcggcgtgctggacaggggccctacttttaagccctactctggcactgcctacaacgccctggctcccaagggtgccccaaatccttgcgaatgggatgaagctgctactgctcttgaaataaacctagaagaagaggacgatgacaacgaagacgaagtagacgagcaagctgagcagcaaaaaactcacgtatttgggcaggcgccttattctggtataaatattacaaaggagggtattcaaataggtgtcgaaggtcaaacacctaaatatgccgataaaacatttcaacctgaacctcaaataggagaatctcagtggtacgaaactgaaattaatcatgcagctgggagagtccttaaaaagactaccccaatgaaaccatgttacggttcatatgcaaaacccacaaatgaaaatggagggcaaggcattcttgtaaagcaacaaaatggaaagctagaaagtcaagtggaaatgcaatttttctcaactactgaggcgaccgcaggcaatggtgataacttgactcctaaagtggtattgtacagtgaagatgtagatatagaaaccccagacactcatatttcttacatgcccactattaaggaaggtaactcacgagaactaatgggccaacaatctatgcccaacaggcctaattacattgcttttagggacaattttattggtctaatgtattacaacagcacgggtaatatgggtgttctggcgggccaagcatcgcagttgaatgctgttgtagatttgcaagacagaaacacagagctttcataccagcttttgcttgattccattggtgatagaaccaggtacttttctatgtggaatcaggctgttgacagctatgatccagatgttagaattattgaaaatcatggaactgaagatgaacttccaaattactgctttccactgggaggtgtgattaatacagagactcttaccaaggtaaaacctaaaacaggtcaggaaaatggatgggaaaaagatgctacagaattttcagataaaaatgaaataagagttggaaataattttgccatggaaatcaatctaaatgccaacctgtggagaaatttcctgtactccaacatagcgctgtatttgcccgacaagctaaagtacagtccttccaacgtaaaaatttctgataacccaaacacctacgactacatgaacaagcgagtggtggctcccgggttagtggactgctacattaaccttggagcacgctggtcccttgactatatggacaacgtcaacccatttaaccaccaccgcaatgctggcctgcgctaccgctcaatgttgctgggcaatggtcgctatgtgcccttccacatccaggtgcctcagaagttctttgccattaaaaacctccttctcctgccgggctcatacacctacgagtggaacttcaggaaggatgttaacatggttctgcagagctccctaggaaatgacctaagggttgacggagccagcattaagtttgatagcatttgcctttacgccaccttcttccccatggcccacaacaccgcctccacgcttgaggccatgcttagaaacgacaccaacgaccagtcctttaacgactatctctccgccgccaacatgctctaccctatacccgccaacgctaccaacgtgcccatatccatcccctcccgcaactgggcggctttccgcggctgggccttcacgcgccttaagactaaggaaaccccatcactgggctcgggctacgacccttattacacctactctggctctataccctacctagatggaaccttttacctcaaccacacctttaagaaggtggccattacctttgactcttctgtcagctggcctggcaatgaccgcctgcttacccccaacgagtttgaaattaagcgctcagttgacggggagggttacaacgttgcccagtgtaacatgaccaaagactggttcctggtacaaatgctagctaactacaacattggctaccagggcttctatatcccagagagctacaaggaccgcatgtactccttctttagaaacttccagcccatgagccgtcaggtggtggatgatactaaatacaaggactaccaacaggtgggcatcctacaccaacacaacaactctggatttgttggctaccttgcccccaccatgcgcgaaggacaggcctaccctgctaacttcccctatccgcttataggcaagaccgcagttgacagcattacccagaaaaagtttctttgcgatcgcaccctttggcgcatcccattctccagtaactttatgtccatgggcgcactcacagacctgggccaaaaccttctctacgccaactccgcccacgcgctagacatgacttttgaggtggatcccatggacgagcccacccttctttatgttttgtttgaagtctttgacgtggtccgtgtgcaccggccgcaccgcggcgtcatcgaaaccgtgtacctgcgcacgcccttctcggccggcaacgccacaacataaagaagcaagcaacatcaacaacagctgccgccatgggctccagtgagcaggaactgaaagccattgtcaaagatcttggttgtgggccatattttttgggcacctatgacaagcgctttccaggctttgtttctccacacaagctcgcctgcgccatagtcaatacggccggtcgcgagactgggggcgtacactggatggcctttgcctggaacccgcactcaaaaacatgctacctctttgagccctttggcttttctgaccagcgactcaagcaggtttaccagtttgagtacgagtcactcctgcgccgtagcgccattgcttcttcccccgaccgctgtataacgctggaaaagtccacccaaagcgtacaggggcccaactcggccgcctgtggactattctgctgcatgtttctccacgcctttgccaactggccccaaactcccatggatcacaaccccaccatgaaccttattaccggggtacccaactccatgctcaacagtccccaggtacagcccaccctgcgtcgcaaccaggaacagctctacagcttcctggagcgccactcgccctacttccgcagccacagtgcgcagattaggagcgccacttctttttgtcacttgaaaaacatgtaaaaataatgtactagagacactttcaataaaggcaaatgcttttatttgtacactctcgggtgattatttacccccacccttgccgtctgcgccgtttaaaaatcaaaggggttctgccgcgcatcgctatgcgccactggcagggacacgttgcgatactggtgtttagtgctccacttaaactcaggcacaaccatccgcggcagctcggtgaagttttcactccacaggctgcgcaccatcaccaacgcgtttagcaggtcgggcgccgatatcttgaagtcgcagttggggcctccgccctgcgcgcgcgagttgcgatacacagggttgcagcactggaacactatcagcgccgggtggtgcacgctggccagcacgctcttgtcggagatcagatccgcgtccaggtcctccgcgttgctcagggcgaacggagtcaactttggtagctgccttcccaaaaagggcgcgtgcccaggctttgagttgcactcgcaccgtagtggcatcaaaaggtgaccgtgcccggtctgggcgttaggatacagcgcctgcataaaagccttgatctgcttaaaagccacctgagcctttgcgccttcagagaagaacatgccgcaagacttgccggaaaactgattggccggacaggccgcgtcgtgcacgcagcaccttgcgtcggtgttggagatctgcaccacatttcggccccaccggttcttcacgatcttggccttgctagactgctccttcagcgcgcgctgcccgttttcgctcgtcacatccatttcaatcacgtgctccttatttatcataatgcttccgtgtagacacttaagctcgccttcgatctcagcgcagcggtgcagccacaacgcgcagcccgtgggctcgtgatgcttgtaggtcacctctgcaaacgactgcaggtacgcctgcaggaatcgccccatcatcgtcacaaaggtcttgttgctggtgaaggtcagctgcaacccgcggtgctcctcgttcagccaggtcttgcatacggccgccagagcttccacttggtcaggcagtagtttgaagttcgcctttagatcgttatccacgtggtacttgtccatcagcgcgcgcgcagcctccatgcccttctcccacgcagacacgatcggcacactcagcgggttcatcaccgtaatttcactttccgcttcgctgggctcttcctcttcctcttgcgtccgcataccacgcgccactgggtcgtcttcattcagccgccgcactgtgcgcttacctcctttgccatgcttgattagcaccggtgggttgctgaaacccaccatttgtagcgccacatcttctctttcttcctcgctgtccacgattacctctggtgatggcgggcgctcgggcttgggagaagggcgcttctttttcttcttgggcgcaatggccaaatccgccgccgaggtcgatggccgcgggctgggtgtgcgcggcaccagcgcgtcttgtgatgagtcttcctcgtcctcggactcgatacgccgcctcatccgcttttttgggggcgcccggggaggcggcggcgacggggacggggacgacacgtcctccatggttgggggacgtcgcgccgcaccgcgtccgcgctcgggggtggtttcgcgctgctcctcttcccgactggccatttccttctcctataggcagaaaaagatcatggagtcagtcgagaagaaggacagcctaaccgccccctctgagttcgccaccaccgcctccaccgatgccgccaacgcgcctaccaccttccccgtcgaggcacccccgcttgaggaggaggaagtgattatcgagcaggacccaggttttgtaagcgaagacgacgaggaccgctcagtaccaacagaggataaaaagcaagaccaggacaacgcagaggcaaacgaggaacaagtcgggcggggggacgaaaggcatggcgactacctagatgtgggagacgacgtgctgttgaagcatctgcagcgccagtgcgccattatctgcgacgcgttgcaagagcgcagcgatgtgcccctcgccatagcggatgtcagccttgcctacgaacgccacctattctcaccgcgcgtaccccccaaacgccaagaaaacggcacatgcgagcccaacccgcgcctcaacttctaccccgtatttgccgtgccagaggtgcttgccacctatcacatctttttccaaaactgcaagatacccctatcctgccgtgccaaccgcagccgagcggacaagcagctggccttgcggcagggcgctgtcatacctgatatcgcctcgctcaacgaagtgccaaaaatctttgagggtcttggacgcgacgagaagcgcgcggcaaacgctctgcaacaggaaaacagcgaaaatgaaagtcactctggagtgttggtggaactcgagggtgacaacgcgcgcctagccgtactaaaacgcagcatcgaggtcacccactttgcctacccggcacttaacctaccccccaaggtcatgagcacagtcatgagtgagctgatcgtgcgccgtgcgcagcccctggagagggatgcaaatttgcaagaacaaacagaggagggcctacccgcagttggcgacgagcagctagcgcgctggcttcaaacgcgcgagcctgccgacttggaggagcgacgcaaactaatgatggccgcagtgctcgttaccgtggagcttgagtgcatgcagcggttctttgctgacccggagatgcagcgcaagctagaggaaacattgcactacacctttcgacagggctacgtacgccaggcctgcaagatctccaacgtggagctctgcaacctggtctcctaccttggaattttgcacgaaaaccgccttgggcaaaacgtgcttcattccacgctcaagggcgaggcgcgccgcgactacgtccgcgactgcgtttacttatttctatgctacacctggcagacggccatgggcgtttggcagcagtgcttggaggagtgcaacctcaaggagctgcagaaactgctaaagcaaaacttgaaggacctatggacggccttcaacgagcgctccgtggccgcgcacctggcggacatcattttccccgaacgcctgcttaaaaccctgcaacagggtctgccagacttcaccagtcaaagcatgttgcagaactttaggaactttatcctagagcgctcaggaatcttgcccgccacctgctgtgcacttcctagcgactttgtgcccattaagtaccgcgaatgccctccgccgctttggggccactgctaccttctgcagctagccaactaccttgcctaccactctgacataatggaagacgtgagcggtgacggtctactggagtgtcactgtcgctgcaacctatgcaccccgcaccgctccctggtttgcaattcgcagctgcttaacgaaagtcaaattatcggtacctttgagctgcagggtccctcgcctgacgaaaagtccgcggctccggggttgaaactcactccggggctgtggacgtcggcttaccttcgcaaatttgtacctgaggactaccacgcccacgagattaggttctacgaagaccaatcccgcccgccaaatgcggagcttaccgcctgcgtcattacccagggccacattcttggccaattgcaagccatcaacaaagcccgccaagagtttctgctacgaaagggacggggggtttacttggacccccagtccggcgaggagctcaacccaatccccccgccgccgcagccctatcagcagcagccgcgggcccttgcttcccaggatggcacccaaaaagaagctgcagctgccgccgccacccacggacgaggaggaatactgggacagtcaggcagaggaggttttggacgaggaggaggaggacatgatggaagactgggagagcctagacgaggaagcttccgaggtcgaagaggtgtcagacgaaacaccgtcaccctcggtcgcattcccctcgccggcgccccagaaatcggcaaccggttccagcatggctacaacctccgctcctcaggcgccgccggcactgcccgttcgccgacccaaccgtagatgggacaccactggaaccagggccggtaagtccaagcagccgccgccgttagcccaagagcaacaacagcgccaaggctaccgctcatggcgcgggcacaagaacgccatagttgcttgcttgcaagactgtgggggcaacatctccttcgcccgccgctttcttctctaccatcacggcgtggccttcccccgtaacatcctgcattactaccgtcatctctacagcccatactgcaccggcggcagcggcagcggcagcaacagcagcggccacacagaagcaaaggcgaccggatagcaagactctgacaaagcccaagaaatccacagcggcggcagcagcaggaggaggagcgctgcgtctggcgcccaacgaacccgtatcgacccgcgagcttagaaacaggatttttcccactctgtatgctatatttcaacagagcaggggccaagaacaagagctgaaaataaaaaacaggtctctgcgatccctcacccgcagctgcctgtatcacaaaagcgaagatcagcttcggcgcacgctggaagacgcggaggctctcttcagtaaatactgcgcgctgactcttaaggactagtttcgcgccctttctcaaatttaagcgcgaaaactacgtcatctccagcggccacacccggcgccagcacctgtcgtcagcgccattatgagcaaggaaattcccacgccctacatgtggagttaccagccacaaatgggacttgcggctggagctgcccaagactactcaacccgaataaactacatgagcgcgggaccccacatgatatcccgggtcaacggaatccgcgcccaccgaaaccgaattctcttggaacaggcggctattaccaccacacctcgtaataaccttaatccccgtagttggcccgctgccctggtgtaccaggaaagtcccgctcccaccactgtggtacttcccagagacgcccaggccgaagttcagatgactaactcaggggcgcagcttgcgggcggctttcgtcacagggtgcggtcgcccgggcagggtataactcacctgacaatcagagggcgaggtattcagctcaacgacgagtcggtgagctcctcgcttggtctccgtccggacgggacatttcagatcggcggcgccggccgtccttcattcacgcctcgtcaggcaatcctaactctgcagacctcgtcctctgagccgcgctctggaggcattggaactctgcaatttattgaggagtttgtgccatcggtctactttaaccccttctcgggacctcccggccactatccggatcaatttattcctaactttgacgcggtaaaggactcggcggacggctacgactgaatgttaagtggagaggcagagcaactgcgcctgaaacacctggtccactgtcgccgccacaagtgctttgcccgcgactccggtgagttttgctactttgaattgcccgaggatcatatcgagggcccggcgcacggcgtccggcttaccgcccagggagagcttgcccgtagcctgattcgggagtttacccagcgccccctgctagttgagcgggacaggggaccctgtgttctcactgtgatttgcaactgtcctaaccttggattacatcaagatctttgttgccatctctgtgctgagtataataaatacagaaattaaaatatactggggctcctatcgccatcctgtaaacgccaccgtcttcacccgcccaagcaaaccaaggcgaaccttacctggtacttttaacatctctccctctgtgatttacaacagtttcaacccagacggagtgagtctacgagagaacctctccgagctcagctactccatcagaaaaaacaccaccctccttacctgccgggaacgtacgagtgcgtcaccggccgctgcaccacacctaccgcctgaccgtaaaccagactttttccggacagacctcaataactctgtttaccagaacaggaggtgagcttagaaaacccttagggtattaggccaaaggcgcagctactgtggggtttatgaacaattcaagcaactctacgggctattctaattcaggtttctctagaatcggggttggggttattctctgtcttgtgattctctttattcttatactaacgcttctctgcctaaggctcgccgcctgctgtgtgcacatttgcatttattgtcagctttttaaacgctggggtcgccacccaagatgattaggtacataatcctaggtttactcacccttgcgtcagcccacggtaccacccaaaaggtggattttaaggagccagcctgtaatgttacattcgcagctgaagctaatgagtgcaccactcttataaaatgcaccacagaacatgaaaagctgcttattcgccacaaaaacaaaattggcaagtatgctgtttatgctatttggcagccaggtgacactacagagtataatgttacagttttccagggtaaaagtcataaaacttttatgtatacttttccattttatgaaatgtgcgacattaccatgtacatgagcaaacagtataagttgtggcccccacaaaattgtgtggaaaacactggcactttctgctgcactgctatgctaattacagtgctcgctttggtctgtaccctactctatattaaatacaaaagcagacgcagctttattgaggaaaagaaaatgccttaatttactaagttacaaagctaatgtcaccactaactgctttactcgctgcttgcaaaacaaattcaaaaagttagcattataattagaataggatttaaaccccccggtcatttcctgctcaataccattcccctgaacaattgactctatgtgggatatgctccagcgctacaaccttgaagtcaggcttcctggatgtcagcatctgactttggccagcacctgtcccgcggatttgttccagtccaactacagcgacccaccctaacagagatgaccaacacaaccaacgcggccgccgctaccggacttacatctaccacaaatacaccccaagtttctgcctttgtcaataactgggataacttgggcatgtggtggttctccatagcgcttatgtttgtatgccttattattatgtggctcatctgctgcctaaagcgcaaacgcgcccgaccacccatctatagtcccatcattgtgctacacccaaacaatgatggaatccatagattggacggactgaaacacatgttcttttctcttacagtatgattaaatgagacatgattcctcgagtttttatattactgacccttgttgcgcttttttgtgcgtgctccacattggctgcggtttctcacatcgaagtagactgcattccagccttcacagtctatttgctttacggatttgtcaccctcacgctcatctgcagcctcatcactgtggtcatcgcctttatccagtgcattgactgggtctgtgtgcgctttgcatatctcagacaccatccccagtacagggacaggactatagctgagcttcttagaattctttaattatgaaatttactgtgacttttctgctgattatttgcaccctatctgcgttttgttccccgacctccaagcctcaaagacatatatcatgcagattcactcgtatatggaatattccaagttgctacaatgaaaaaagcgatctttccgaagcctggttatatgcaatcatctctgttatggtgttctgcagtaccatcttagccctagctatatatccctaccttgacattggctggaaacgaatagatgccatgaaccacccaactttccccgcgcccgctatgcttccactgcaacaagttgttgccggcggctttgtcccagccaatcagcctcgccccacttctcccacccccactgaaatcagctactttaatctaacaggaggagatgactgacaccctagatctagaaatggacggaattattacagagcagcgcctgctagaaagacgcagggcagcggccgagcaacagcgcatgaatcaagagctccaagacatggttaacttgcaccagtgcaaaaggggtatcttttgtctggtaaagcaggccaaagtcacctacgacagtaataccaccggacaccgccttagctacaagttgccaaccaagcgtcagaaattggtggtcatggtgggagaaaagcccattaccataactcagcactcggtagaaaccgaaggctgcattcactcaccttgtcaaggacctgaggatctctgcacccttattaagaccctgtgcggtctcaaagatcttattccctttaactaataaaaaaaaataataaagcatcacttacttaaaatcagttagcaaatttctgtccagtttattcagcagcacctccttgccctcctcccagctctggtattgcagcttcctcctggctgcaaactttctccacaatctaaatggaatgtcagtttcctcctgttcctgtccatccgcacccactatcttcatgttgttgcagatgaagcgcgcaagaccgtctgaagataccttcaaccccgtgtatccatatgacacggaaaccggtcctccaactgtgccttttcttactcctccctttgtatcccccaatgggtttcaagagagtccccctggggtactctctttgcgcctatccgaacctctagttacctccaatggcatgcttgcgctcaaaatgggcaacggcctctctctggacgaggccggcaaccttacctcccaaaatgtaaccactgtgagcccacctctcaaaaaaaccaagtcaaacataaacctggaaatatctgcacccctcacagttacctcagaagccctaactgtggctgccgccgcacctctaatggtcgcgggcaacacactcaccatgcaatcacaggccccgctaaccgtgcacgactccaaacttagcattgccacccaaggacccctcacagtgtcagaaggaaagctagccctgcaaacatcaggccccctcaccaccaccgatagcagtacccttactatcactgcctcaccccctctaactactgccactggtagcttgggcattgacttgaaagagcccatttatacacaaaatggaaaactaggactaaagtacggggctcctttgcatgtaacagacgacctaaacactttgaccgtagcaactggtccaggtgtgactattaataatacttccttgcaaactaaagttactggagccttgggttttgattcacaaggcaatatgcaacttaatgtagcaggaggactaaggattgattctcaaaacagacgccttatacttgatgttagttatccgtttgatgctcaaaaccaactaaatctaagactaggacagggccctctttttataaactcagcccacaacttggatattaactacaacaaaggcctttacttgtttacagcttcaaacaattccaaaaagcttgaggttaacctaagcactgccaaggggttgatgtttgacgctacagccatagccattaatgcaggagatgggcttgaatttggttcacctaatgcaccaaacacaaatcccctcaaaacaaaaattggccatggcctagaatttgattcaaacaaggctatggttcctaaactaggaactggccttagttttgacagcacaggtgccattacagtaggaaacaaaaataatgataagctaactttgtggaccacaccagctccatctcctaactgtagactaaatgcagagaaagatgctaaactcactttggtcttaacaaaatgtggcagtcaaatacttgctacagtttcagttttggctgttaaaggcagtttggctccaatatctggaacagttcaaagtgctcatcttattataagatttgacgaaaatggagtgctactaaacaattccttcctggacccagaatattggaactttagaaatggagatcttactgaaggcacagcctatacaaacgctgttggatttatgcctaacctatcagcttatccaaaatctcacggtaaaactgccaaaagtaacattgtcagtcaagtttacttaaacggagacaaaactaaacctgtaacactaaccattacactaaacggtacacaggaaacaggagacacaactccaagtgcatactctatgtcattttcatgggactggtctggccacaactacattaatgaaatatttgccacatcctcttacactttttcatacattgcccaagaataaagaatcgtttgtgttatgtttcaacgtgtttatttttcaattgcagaaaatttcaagtcatttttcattcagtagtatagccccaccaccacatagcttatacagatcaccgtaccttaatcaaactcacagaaccctagtattcaacctgccacctccctcccaacacacagagtacacagtcctttctccccggctggccttaaaaagcatcatatcatgggtaacagacatattcttaggtgttatattccacacggtttcctgtcgagccaaacgctcatcagtgatattaataaactccccgggcagctcacttaagttcatgtcgctgtccagctgctgagccacaggctgctgtccaacttgcggttgcttaacgggcggcgaaggagaagtccacgcctacatgggggtagagtcataatcgtgcatcaggatagggcggtggtgctgcagcagcgcgcgaataaactgctgccgccgccgctccgtcctgcaggaatacaacatggcagtggtctcctcagcgatgattcgcaccgcccgcagcataaggcgccttgtcctccgggcacagcagcgcaccctgatctcacttaaatcagcacagtaactgcagcacagcaccacaatattgttcaaaatcccacagtgcaaggcgctgtatccaaagctcatggcggggaccacagaacccacgtggccatcataccacaagcgcaggtagattaagtggcgacccctcataaacacgctggacataaacattacctcttttggcatgttgtaattcaccacctcccggtaccatataaacctctgattaaacatggcgccatccaccaccatcctaaaccagctggccaaaacctgcccgccggctatacactgcagggaaccgggactggaacaatgacagtggagagcccaggactcgtaaccatggatcatcatgctcgtcatgatatcaatgttggcacaacacaggcacacgtgcatacacttcctcaggattacaagctcctcccgcgttagaaccatatcccagggaacaacccattcctgaatcagcgtaaatcccacactgcagggaagacctcgcacgtaactcacgttgtgcattgtcaaagtgttacattcgggcagcagcggatgatcctccagtatggtagcgcgggtttctgtctcaaaaggaggtagacgatccctactgtacggagtgcgccgagacaaccgagatcgtgttggtcgtagtgtcatgccaaatggaacgccggacgtagtcatatttcctgaagcaaaaccaggtgcgggcgtgacaaacagatctgcgtctccggtctcgccgcttagatcgctctgtgtagtagttgtagtatatccactctctcaaagcatccaggcgccccctggcttcgggttctatgtaaactccttcatgcgccgctgccctgataacatccaccaccgcagaataagccacacccagccaacctacacattcgttctgcgagtcacacacgggaggagcgggaagagctggaagaaccatgtttttttttttattccaaaagattatccaaaacctcaaaatgaagatctattaagtgaacgcgctcccctccggtggcgtggtcaaactctacagccaaagaacagataatggcatttgtaagatgttgcacaatggcttccaaaaggcaaacggccctcacgtccaagtggacgtaaaggctaaacccttcagggtgaatctcctctataaacattccagcaccttcaaccatgcccaaataattctcatctcgccaccttctcaatatatctctaagcaaatcccgaatattaagtccggccattgtaaaaatctgctccagagcgccctccaccttcagcctcaagcagcgaatcatgattgcaaaaattcaggttcctcacagacctgtataagattcaaaagcggaacattaacaaaaataccgcgatcccgtaggtcccttcgcagggccagctgaacataatcgtgcaggtctgcacggaccagcgcggccacttccccgccaggaaccatgacaaaagaacccacactgattatgacacgcatactcggagctatgctaaccagcgtagccccgatgtaagcttgttgcatgggcggcgatataaaatgcaaggtgctgctcaaaaaatcaggcaaagcctcgcgcaaaaaagaaagcacatcgtagtcatgctcatgcagataaaggcaggtaagctccggaaccaccacagaaaaagacaccatttttctctcaaacatgtctgcgggtttctgcataaacacaaaataaaataacaaaaaaacatttaaacattagaagcctgtcttacaacaggaaaaacaacccttataagcataagacggactacggccatgccggcgtgaccgtaaaaaaactggtcaccgtgattaaaaagcaccaccgacagctcctcggtcatgtccggagtcataatgtaagactcggtaaacacatcaggttgattcacatcggtcagtgctaaaaagcgaccgaaatagcccgggggaatacatacccgcaggcgtagagacaacattacagcccccataggaggtataacaaaattaataggagagaaaaacacataaacacctgaaaaaccctcctgcctaggcaaaatagcaccctcccgctccagaacaacatacagcgcttccacagcggcagccataacagtcagccttaccagtaaaaaagaaaacctattaaaaaaacaccactcgacacggcaccagctcaatcagtcacagtgtaaaaaagggccaagtgcagagcgagtatatataggactaaaaaatgacgtaacggttaaagtccacaaaaaacacccagaaaaccgcacgcgaacctacgcccagaaacgaaagccaaaaaacccacaacttcctcaaatcgtcacttccgttttcccacgttacgtaacttcccattttaagaaaactacaattcccaacacatacaagttactccgccctaaaacctacgtcacccgccccgttcccacgccccgcgccacgtcacaaactccaccccctcattatcatattggcttcaatccaaaataaggtatattattgatgatg

SEQ ID NO: 138 - DNA, 34794 bp, Human adenovirus B2
catcatcaataatataccttatagatggaatggtgccaatatgtaaatgaggtgattttaaaaagtgtggatcgtgtggtgattggctgtggggttaacggctaaaaggggcggtgcgaccgtgggaaaatgacgttttgtgggggtggagtttttttgcaagttgtcgcgggaaatgtgacgcataaaaaggcttttttctcacggaactacttagttttcccacggtatttaacaggaaatgaggtagttttgaccggatgcaagtgaaaattgttgattttcgcgcgaaaactgaatgaggaagtgtttttctgaataatgtggtatttatggcagggtggagtatttgttcagggccaggtagactttgacccattacgtggaggtttcgattaccgtgttttttacctgaatttccgcgtaccgtgtcaaagtcttctgtttttacgtaggtgtcagctgatcgctagggtatttatacctcagggtttgtgtcaagaggccactcttgagtgccagcgagaagagttttctcctctgcgccggcagtttaataataaaaaaatgagagatttgcgatttctgcctcaggaaataatctctgctgagactggaaatgaaatattggagcttgtggtgcacgccctgatgggagacgatccggagccacctgtgcagctttttgagcctcctacgcttcaggaactgtatgatttagaggtagagggatcggaggattctaatgaggaagctgtaaatggcttttttaccgattctatgcttttagctgctaatgaagggttagaattagatccgcctttggacacttttgatactccaggggtaattgtggaaagcggtacaggtgtaagaaaattacctgatttgagttccgtggactgtgatttgcactgctatgaagacgggtttcctccgagtgatgaggaggaccatgaaaaggagcagtccatgcagactgcagcgggtgagggagtgaaggctgccaatgttggttttcagttggattgcccggagcttcctggacatggctgtaagtcttgtgaatttcacaggaaaaatactggagtaaaggaactgttatgttcgctttgttatatgagaacgcactgccactttatttacagtaagtgtgtttaagttaaaatttaaaggaatatgctgtttttcacatgtatattgagtgtgagttttgtgcttcttattataggtcctgtgtctgatgctgatgaatcaccatctcctgattctactacctcacctcctgagattcaagcacctgttcctgtggacgtgcgcaagcccattcctgtgaagcttaagcctgggaaacgtccagcagtggaaaaacttgaggacttgttacagggtggggacggacctttggacttgagtacacggaaacgtccaagacaataagtgttccatatccgtgtttacttaaggtgacgtcaatatttgtgtgacagtgcaatgtaataaaaatatgttaactgttcactggtttttattgctttttgggcggggactcaggtatataagtagaagcagacctgtgtggttagctcataggagctggctttcatccatggaggtttgggccattttggaagaccttaggaagactaggcaactgttagagaacgcttcggacggagtctccggtttttggagattctggttcgctagtgaattagctagggtagtttttaggataaaacaggactataaccaagaatttgaaaagttgttggtagattgcccaggactttttgaagctcttaatttgggccatcaggttcactttaaagaaaaagttttatcagttttagacttttcaaccccaggtagaactgctgctgctgtggcttttcttacttttatattagataaatggatcccgcagactcatttcagcaggggatacgttttggatttcatagccacagcattgtggagaacatggaaggttcgcaagatgaggacaatcttaggttactggccagtgcagcctttgggtgtagcgggaatcctgaggcatccaccggtcatgccagcggttctggaggaggaacagcaagaggacaacccgagagccggcctggaccctccagtggaggaggcggagtagctgacttgtctcctgaactgcaacgggtgcttactggatctacgtccactggacgggataggggcgttaagagggagagggcatctagtggtactgatgctagatctgagttggctttaagtttaatgagtcgcagacgtcctgaaaccatttggtggcatgaggttcagaaagagggaagggatgaagtttctgtattgcaggagaaatattcactggaacaggtgaaaacatgttggttggagcctgaggatgattgggaggtggccattaaaaattatgccaagatagctttgaggcctgataaacagtataagattactagacggattaatatccggaatgcttgttacatatctggaaatggggctgaggtggtaatagatactcaagacaaggcagttattagatgctgcatgatggatatgtggcctggggtagtcggtatggaagcagtaacttttgtaaatgttaagtttaggggagatggttataatggaatagtgtttatggccaataccaaacttatattgcatggttgtagcttttttggtttcaacaatacctgtgtagatgcctggggacaggttagtgtacggggatgtagtttctatgcgtgttggattgccacagctggcagaaccaagagtcaattgtctctgaagaaatgcatatttcaaagatgtaacctgggcattctgaatgaaggcgaagcaagggtccgccactgcgcttctacagatactggatgttttattttgattaagggaaatgccagcgtaaagcataacatgatttgcggtgcttccgatgagaggccttatcaaatgctcacttgtgctggtgggcattgtaatatgctggctactgtgcatattgtttcccatcaacgcaaaaaatggcctgtttttgatcacaatgtgatgacgaagtgtaccatgcatgcaggtgggcgtagaggaatgtttatgccttaccagtgtaacatgaatcatgtgaaagtgttgttggaaccagatgccttttccagaatgagcctaacaggaatttttgacatgaacatgcaaatctggaagatcctgaggtatgatgatacgagatcgagggtacgcgcatgcgaatgcggaggcaagcatgccaggttccagccggtgtgtgtagatgtgactgaagatctcagaccggatcatttggttattgcccgcactggagcagagttcggatccagtggagaagaaactgactaaggtgagtattgggaaaactttggggtgggattttcagatggacagattgagtaaaaatttgttttttctgtcttgcagctgtcatgagtggaaacgcttcttttaaggggggagtcttcagcccttatctgacagggcgtctcccatcctgggcaggagttcgtcagaatgttatgggatctactgtggatggaagacccgtccaacccgccaattcttcaacgctgacctatgctactttaagttcttcacctttggacgcagctgcagctgccgccgccgcttctgttgccgctaacactgtgcttggaatgggttactatggaagcatcatggctaattccacttcctctaataacccttctaccctgactcaggacaagttacttgtccttttggcccagctggaggctttgacccaacgtctgggtgaactttctcagcaggtggtcgagttgcgagtacaaactgagtctgctgtcggcacggcaaagtctaaataaaaaaatcccagaatcaatgaataaataaacaagcttgttgttgatttaaaatcaagtgtttttatttcatttttcgcgcacggtatgccctagaccaccgatctctatcattgagaactcggtggattttttccaggatcctatagaggtgggattgaatgtttagatacatgggcattaggccgtctttggggtggagatagctccattgaagggattcatgctccggggtagtgttgtaaatcacccagtcataacaaggtcgcagtgcatggtgttgcacaatatcttttagaagtaggctgattgccacagataagcccttggtgtaggtgtttacaaaccggttgagctgggatgggtgcattcggggtgaaattatgtgcattttggattggatttttaagttggcaatattgccgccaagatcccgtcttgggttcatgttatgaaggaccaccaagacggtgtatccggtacatttaggaaatttatcgtgcagcttggatggaaaagcgtggaaaaatttggagacacccttgtgtcctccaagattttccatgcactcatccatgataatagcaatggggccgtgggcagcggcgcgggcaaacacgttccgtgggtctgacacatcatagttatgttcctgagttaaatcatcataagccattttaatgaatttggggcggagagtaccagattggggtatgaatgttccttcgggccccggagcatagttcccctcacagatttgcatttcccaagctttcagttccgagggtggaatcatgtccacctggggggctatgaaaaacaccgtttctggggcgggggtgattaattgtgatgatagcaaatttctgagcaattgagatttgccacatccggtggggccataaatgattccgattacgggttgcaggtggtagtttagggaacggcaactgccgtcttctcgaagcaagggggccacctcgttcatcatttcccttacatgcatattttcccgcaccaaatccattaggaggcgctctcctcctagtgatagaagttcttgtagtgaggaaaagtttttcagcggtttcagaccgtcagccatgggcattttggagagagtttgctgcaaaagttctagtctgttccacagttcagtgatgtgttctatggcatctcgatccagcagacctcctcgtttcgcgggtttggacggctcctggaatagggtatgagacgatgggcgtccagcgctgccagggttcggtccttccagggtctcagtgttcgagtcagggttgtttccgtcacagtgaaggggtgtgcgcctgcttgggcgcttgccagggtgcgcttcagactcatcctgctggtcgaaaacttctgtcgcttggcgccctgtatgtcggccaagtagcagtttaccatgagttcgtagttgagcgcctcggctgcgtggcctttggcgcggagcttacctttggaagttttcttgcataccgggcagtataggcatttcagcgcatacaacttgggcgcaaggaaaacggattctggggagtatgcatctgcgccgcaggaggcgcaaacagtttcacattccaccagccaggttaaatccggttcattggggtcaaaaacaagttttccgccatattttttgatgcgtttcttacctttggtctccatgagttcgtgtcctcgttgagtgacaaacaggctgtccgtgtccccgtagactgattttacaggcctcttctccagtggagtgcctcggtcttcttcgtacaggaactctgaccactctgatacaaaggcgcgcgtccaggccagcacaaaggaggctatgtgggaggggtagcgatcgttgtcaaccagggggtccaccttttccaaagtatgcaaacacatgtcaccctcttcaacatccaggaatgtgattggcttgtaggtgtatttcacgtgacctggggtccccgctgggggggtataaaagggggcggttctttgctcttcctcactgtcttccggatcgctgtccaggaacgtcagctgttggggtaggtattccctctcgaaggcgggcatgacctctgcactcaggttgtcagtttctaagaacgaggaggatttgatattgacagtgccggttgagatgcctttcatgaggttttcgtccatttggtcagaaaacacaatttttttattgtcaagtttggtggcaaatgatccatacagggcgttggataaaagtttggcaatggatcgcatggtttggttcttttccttgtccgcgcgctctttggcggcgatgttgagttggacatactcgcgtgccaggcacttccattcggggaagatagttgttaattcatctggcacgattctcacttgccaccctcgattatgcaaggtaattaaatccacactggtggccacctcgcctcgaaggggttcattggtccaacagagcctacctcctttcctagaacagaaagggggaagtgggtctagcataagttcatcgggagggtctgcatccatggtaaagattcccggaagtaaatccttatcaaaatagctgatgggagtggggtcatctaaggccatttgccattctcgagctgccagtgcgcgctcatatgggttaaggggactgccccatggcatgggatgggtgagtgcagaggcatacatgccacagatgtcatagacgtagatgggatcctcaaagatgcctatgtaggttggatagcatcgcccccctctgatacttgctcgcacatagtcatatagttcatgtgatggcgctagcagccccggacccaagttggtgcgattgggtttttctgttctgtagacgatctggcgaaagatggcgtgagaattggaagagatggtgggtctttgaaaaatgttgaaatgggcatgaggtagacctacagagtctctgacaaagtgggcataagattcttgaagcttggttaccagttcggcggtgacaagtacgtctagggcgcagtagtcaagtgtttcttgaatgatgtcataacctggttggtttttcttttcccacagttcgcggttgagaaggtattcttcgcgatccttccagtactcttctagcggaaacccgtctttgtctgcacggtaagatcctagcatgtagaactgattaactgccttgtaagggcagcagcccttctctacgggtagagagtatgcttgagcagcttttcgtagcgaagcgtgagtaagggcaaaggtgtctctgaccatgactttgagaaattggtatttgaagtcgatgtcgtcacaggctccctgttcccagagttggaagtctacccgtttcttgtaggcggggttgggcaaagcgaaagtaacatcattgaagagaatcttaccggctctgggcataaaattgcgagtgatgcgaaaaggctgtggtacttccgctcgattgttgatcacctgggcagctaggacgatctcgtcgaaaccgttgatgttgtgtcctacgatgtataattctatgaaacgcggcgtgcctctgacgtgaggtagcttactgagctcatcaaaggttaggtctgtggggtcagataaggcgtagtgttcgagagcccattcgtgcaggtgaggatttgcatgtaggaatgatgaccaaagatctaccgccagtgctgtttgtaactggtcccgatactgacgaaaatgccggccaattgccattttttctggagtgacacagtagaaggttctggggtcttgttgccatcgatcccacttgagtttaatggctagatcgtgggccatgttgacgagacgctcttctcctgagagtttcatgaccagcatgaaaggaactagttgtttgccaaaggatcccatccaggtgtaagtttccacatcgtaggtcaggaagagtctttctgtgcgaggatgagagccgatcgggaagaactggatttcctgccaccagttggaggattggctgttgatgtgatggaagtagaagtttctgcggcgcgccgagcattcgtgtttgtgcttgtacagacggccgcagtagtcgcagcgttgcacgggttgtatctcgtgaatgagttgtacctggcttcccttgacgagaaatttcagtgggaagccgaggcctggcgattgtatctcgtgctcttctatattcgctgtatcggcctgttcatcttctgtttcgatggtggtcatgctgacgagcccccgcgggaggcaagtccagacctcggcgcgggaggggcggagctgaaggacgagagcgcgcaggctggagctgtccagagtcctgagacgctgcggactcaggttagtaggtagggacagaagattaacttgcatgatcttttccagggcgtgcgggaggttcagatggtacttgatttccacaggttcgtttgtagagacgtcaatggcttgcagggttccgtgtcctttgggcgccactaccgtacctttgttttttcttttgatcggtggtggctctcttgcttcttgcatgctcagaagcggtgacggggacgcgcgccgggcggcagcggttgttccggacccgagggcatggctggtagtggcacgtcggcgccgcgcacgggcaggttctggtactgcgctctgagaagacttgcgtgcgccaccacgcgtcgattgacgtcttgtatctgacgtctctgggtgaaagctaccggccccgtgagcttgaacctgaaagagagttcaacagaatcaatttcggtatcgttaacggcagcttgtctcagtatttcttgtacgtcaccagagttgtcctggtaggcgatctccgccatgaactgctcgatttcttcctcctgaagatctccgcgacccgctctttcgacggtggccgcgaggtcattggagatacggcccatgagttgggagaatgcattcatgcccgcctcgttccagacgcggctgtaaaccacggccccctcggagtctcttgcgcgcatcaccacctgagcgaggttaagctccacgtgtctggtgaagaccgcatagttgcataggcgctgaaaaaggtagttgagtgtggtggcaatgtgttcggcgacgaagaaatacatgatccatcgtctcagcggcatttcgctaacatcgcccagagcttccaagcgctccatggcctcgtagaagtccacggcaaaattaaaaaactgggagtttcgcgcggacacggtcaattcctcctcgagaagacggatgagttcggctatggtggcccgtacttcgcgttcgaaggctcccgggatctcttcttcctcttctatctcttcttccactaacatctcttcttcgtcttcaggcgggggcggagggggcacgcggcgacgtcgacggcgcacgggcaaacggtcgatgaatcgttcaatgacctctccgcggcggcggcgcatggtttcagtgacggcgcggccgttctcgcgcggtcgcagagtaaaaacaccgccgcgcatctccttaaagtggtgactgggaggttctccgtttgggagggagagggcgctgattatacattttattaattggcccgtagggactgcacgcagagatctgatcgtgtcaagatccacgggatctgaaaacctttcgacgaaagcgtctaaccagtcacagtcacaaggtaggctgagtacggcttcttgtgggcgggggtggttatgtgttcggtctgggtcttctgtttcttcttcatctcgggaaggtgagacgatgctgctggtgatgaaattaaagtaggcagttctaagacggcggatggtggcgaggagcaccaggtctttgggtccggcttgctggatacgcaggcgattggccattccccaagcattatcctgacatctagcaagatctttgtagtagtcttgcatgagccgttctacgggcacttcttcctcacccgttctgccatgcatacgtgtgagtccaaatccgcgcattggttgtaccagtgccaagtcagctacgactctttcggcgaggatggcttgctgtacttgggtaagggtggcttgaaagtcatcaaaatccacaaagcggtggtaagctcctgtattaatggtgtaagcacagttggccatgactgaccagttaactgtctggtgaccagggcgcacgagctcggtgtatttaaggcgcgaataggcgcgggtgtcaaagatgtaatcgttgcaggtgcgcaccagatactggtaccctataagaaaatgcggcggtggttggcggtagagaggccatcgttctgtagctggagcgccaggggcgaggtcttccaacataaggcggtgatagccgtagatgtacctggacatccaggtgattcctgcggcggtagtagaagcccgaggaaactcgcgtacgcggttccaaatgttgcgtagcggcatgaagtagttcattgtaggcacggtttgaccagtgaggcgcgcgcagtcattgatgctctatagacacggagaaaatgaaagcgttcagcgactcgactccgtagcctggaggaacgtgaacgggttgggtcgcggtgtaccccggttcgagacttgtactcgagccggccggagccgcggctaacgtggtattggcactcccgtctcgacccagcctacaaaaatccaggatacggaatcgagtcgttttgctggtttccgaatggcagggaagtgagtcctattttttttttttgccgctcagatgcatcccgtgctgcgacagatgcgcccccaacaacagcccccctcgcagcagcagcagcagcaatcacaaaaggctgtccctgcaactactgcaactgccgccgtgagcggtgcgggacagcccgcctatgatctggacttggaagagggcgaaggactggcacgtctaggtgcgccttcacccgagcggcatccgcgagttcaactgaaaaaagattctcgcgaggcgtatgtgccccaacagaacctatttagagacagaagcggcgaggagccggaggagatgcgagcttcccgctttaacgcgggtcgtgagctgcgtcacggtttggaccgaagacgagtgttgcgggacgaggatttcgaagttgatgaaatgacagggatcagtcctgccagggcacacgtggctgcagccaaccttgtatcggcttacgagcagacagtaaaggaagagcgtaacttccaaaagtcttttaataatcatgtgcgaaccctgattgcccgcgaagaagttacccttggtttgatgcatttgtgggatttgatggaagctatcattcagaaccctactagcaaacctctgaccgcccagctgtttctggtggtgcaacacagcagagacaatgaggctttcagagaggcgctgctgaacatcaccgaacccgaggggagatggttgtatgatcttatcaacattctacagagtatcatagtgcaggagcggagcctgggcctggccgagaaggtggctgccatcaattactcggttttgagcttgggaaaatattacgctcgcaaaatctacaagactccatacgttcccatagacaaggaggtgaagatagatgggttctacatgcgcatgacgctcaaggtcttgaccctgagcgatgatcttggggtgtatcgcaatgacagaatgcatcgcgcggttagcgccagcaggaggcgcgagttaagcgacagggaactgatgcacagtttgcaaagagctctgactggagctggaaccgagggtgagaattacttcgacatgggagctgacttgcagtggcagcctagtcgcagggctctgagcgccgcgacggcaggatgtgagcttccttacatagaagaggcggatgaaggcgaggaggaagagggcgagtacttggaagactgatggcacaacccgtgttttttgctagatggaacagcaagcaccggatcccgcaatgcgggcggcgctgcagagccagccgtccggcattaactcctcggacgattggacccaggccatgcaacgtatcatggcgttgacgactcgcaaccccgaagcctttagacagcaaccccaggccaaccgtctatcggccatcatggaagctgtagtgccttcccgctctaatcccactcatgagaaggtcctggccatcgtgaacgcgttggtggagaacaaagctattcgtccagatgaggccggactggtatacaacgctctcttagaacgcgtggctcgctacaacagtagcaatgtgcaaaccaatttggaccgtatgataacagatgtacgcgaagccgtgtctcagcgcgaaaggttccagcgtgatgccaacctgggttcgctggtggcgttaaatgctttcttgagtactcagcctgctaatgtgccgcgtggtcaacaggattatactaactttttaagcgctttgagactgatggtatcagaagtacctcagagcgaagtgtatcagtccggtcctgattacttctttcagactagcagacagggcttgcagacggtaaatctgagccaagcttttaaaaaccttaaaggtttgtggggagtgcatgccccggtaggagaaagagcaaccgtgtctagcttgttaactccgaactcccgcctattattactgttggtagctcctttcaccgacagcggtagcatcgaccgtaattcctatttgggttacctactaaacctgtatcgcgaagccatagggcaaagtcaggtggacgagcagacctatcaagaaattacccaagtcagtcgcgctttgggacaggaagacactggcagtttggaagccactctgaacttcttgcttaccaatcggtctcaaaagatccctcctcaatatgctcttactgcggaggaggagaggatccttagatatgtgcagcagagcgtgggattgtttctgatgcaagagggggcaactccgactgcagcactggacatgacagcgcgaaatatggagcccagcatgtatgccagtaaccgacctttcattaacaaactgctggactacttgcacagagctgccgctatgaactctgattatttcaccaatgccatcttaaacccgcactggctgcccccacctggtttctacacgggcgaatatgacatgcccgaccctaatgacggatttctgtgggacgacgtggacagcgatgttttttcacctctttctgatcatcgcacgtggaaaaaggaaggcggcgatagaatgcattcttctgcatcgctgtccggggtcatgggtgctaccgcggctgagcccgagtctgcaagtccttttcctagtctacccttttctctacacagtgtacgtagcagcgaagtgggtagaataagtcgcccgagtttaatgggcgaagaggagtatctaaacgattccttgctcagaccggcaagagaaaaaaatttcccaaacaatggaatagaaagtttggtggataaaatgagtagatggaagacttatgctcaggatcacagagacgagcctgggatcatggggattacaagtagagcgagccgtagacgccagcgccatgacagacagaggggtcttgtgtgggacgatgaggattcggccgatgatagcagcgtgctggacttgggtgggagaggaaggggcaacccgtttgctcatttgcgccctcgcttgggtggtatgttgtaaaaaaaaataaaaaaaaaactcaccaaggccatggcgacgagcgtacgttcgttcttctttattatctgtgtctagtataatgaggcgagtcgtgctaggcggagcggtggtgtatccggagggtcctcctccttcgtacgagagcgtgatgcagcagcagcaggcgacggcggtgatgcaatccccactggaggctccctttgtgcctccgcgatacctggcacctacggagggcagaaacagcattcgttattcggaactggcacctcagtacgataccaccaggttgtatctggtggacaacaagtcggcggacattgcttctctgaactatcagaatgaccacagcaacttcttgaccacggtggtgcaaaacaatgactttacccctacggaagccagcacccagaccattaactttgatgaacgatcgcggtggggcggtcagctaaagaccatcatgcatactaacatgccaaacgtgaacgagtatatgtttagtaacaagttcaaagcgcgtgtgatggtgtccagaaaacctcccgacggtgctgcagttggggatacttatgatcacaagcaggatattttgaaatatgagtggttcgagtttactttgccagaaggcaacttttcagttactatgactattgatttgatgaacaatgccatcatagataattacttgaaagtgggtagacagaatggagtgcttgaaagtgacattggtgttaagttcgacaccaggaacttcaagctgggatgggatcccgaaaccaagttgatcatgcctggagtgtatacgtatgaagccttccatcctgacattgtcttactgcctggctgcggagtggattttaccgagagtcgtttgagcaaccttcttggtatcagaaaaaaacagccatttcaagagggttttaagattttgtatgaagatttagaaggtggtaatattccggccctcttggatgtagatgcctatgagaacagtaagaaagaacaaaaagccaaaatagaagctgctacagctgctgcagaagctaaggcaaacatagttgccagcgactctacaagggttgctaacgctggagaggtcagaggagacaattttgcgccaacacctgttccgactgcagaatcattattggccgatgtgtctgaaggaacggacgtgaaactcactattcaacctgtagaaaaagatagtaagaatagaagctataatgtgttggaagacaaaatcaacacagcctatcgcagttggtatctttcgtacaattatggcgatcccgaaaaaggagtgcgttcctggacattgctcaccacctcagatgtcacctgcggagcagagcaggtctactggtcgcttccagacatgatgaaggatcctgtcactttccgctccactagacaagtcagtaactaccctgtggtgggtgcagagcttatgcccgtcttctcaaagagcttctacaacgaacaagctgtgtactcccagcagctccgccagtccacctcgcttacgcacgtcttcaaccgctttcctgagaaccagattttaatccgtccgccggcgcccaccattaccaccgtcagtgaaaacgttcctgctctcacagatcacgggaccctgccgttgcgcagcagtatccggggagtccaacgtgtgaccgttactgacgccagacgccgcacctgtccctacgtgtacaaggcactgggcatagtcgcaccgcgcgtcctttcaagccgcactttctaaaaaaaaaaaaaatgtccattcttatctcgcccagtaataacaccggttggggtctgcgcgctccaagcaagatgtacggaggcgcacgcaaacgttctacccaacatcctgtccgtgttcgcggacattttcgcgctccatggggcgccctcaagggccgcactcgcgttcgaaccaccgtcgatgatgtaatcgatcaggtggttgccgacgcccgtaattatactcctactgcgcctacatctactgtggatgcagttattgacagtgtagtggctgacgctcgcaactatgctcgacgtaagagccggcgaaggcgcattgccagacgccaccgagctaccactgccatgcgagccgcaagagctctgctacgaagagctagacgcgtggggcgaagagccatgcttagggcggccagacgtgcagcttcgggcgccagcgccggcaggtcccgcaggcaagcagccgctgtcgcagcggcgactattgccgacatggcccaatcgcgaagaggcaatgtatactgggtgcgtgacgctgccaccggtcaacgtgtacccgtgcgcacccgtccccctcgcacttagaagatactgagcagtctccgatgttgtgtcccagcggcgaggatgtccaagcgcaaatacaaggaagaaatgctgcaggttatcgcacctgaagtctacggccaaccgttgaaggatgaaaaaaaaccccgcaaaatcaagcgggttaaaaaggacaaaaaagaagaggaagatggcgatgatgggctggcggagtttgtgcgcgagtttgccccacggcgacgcgtgcaatggcgtgggcgcaaagttcgacatgtgttgagacctggaacttcggtggtctttacacccggcgagcgttcaagcgctacttttaagcgttcctatgatgaggtgtacggggatgatgatattcttgagcaggcggctgaccgattaggcgagtttgcttatggcaagcgtagtagaataacttccaaggatgagacagtgtcgatacccttggatcatggaaatcccacccctagtcttaaaccggtcactttgcagcaagtgttacccgtaactccgcgaacaggtgttaaacgcgaaggtgaagatttgtatcccactatgcaactgatggtacccaaacgccagaagttggaggacgttttggagaaagtaaaagtggatccagatattcaacctgaggttaaagtgagacccattaagcaggtagcgcctggtctgggggtacaaactgtagacattaagattcccactgaaagtatggaagtgcaaactgaacccgcaaagcctactgccacctccactgaagtgcaaacggatccatggatgcccatgcctattacaactgacgccgccggtcccactcgaagatcccgacgaaagtacggtccagcaagtctgttgatgcccaattatgttgtacacccatctattattcctactcctggttaccgaggcactcgctactatcgcagccgaaacagtacctcccgccgtcgccgcaagacacctgcaaatcgcagtcgtcgccgtagacgcacaagcaaaccgactcccggcgccctggtgcggcaagtgtaccgcaatggtagtgcggaacctttgacactgccgcgtgcgcgttaccatccgagtatcatcacttaatcaatgttgccgctgcctccttgcagatatggccctcacttgtcgccttcgcgttcccatcactggttaccgaggaagaaactcgcgccgtagaagagggatgttgggacgcggaatgcgacgctacaggcgacggcgtgctatccgcaagcaattgcggggtggttttttaccagccttaattccaattatcgctgctgcaattggcgcgataccaggcatagcttccgtggcggttcaggcctcgcaacgacattgacattggaaaaaaacgtataaataaaaaaaaaaaaatacaatggactctgacactcctggtcctgtgactatgttttcttagagatggaagacatcaatttttcatccttggctccgcgacacggcacgaagccgtacatgggcacctggagcgacatcggcacgagccaactgaacgggggcgccttcaattggagcagtatctggagcgggcttaaaaattttggctcaaccataaaaacatacgggaacaaagcttggaacagcagtacaggacaggcgcttagaaataaacttaaagaccagaacttccaacaaaaagtagtcgatgggatagcttccggcatcaatggagtggtagatttggctaaccaggctgtgcagaaaaagataaacagtcgtttggacccgccgccagcaaccccaggtgaaatgcaagtggaggaagaaattcctccgccagaaaaacgaggcgacaagcgtccgcgtcccgatttggaagagacgctggtgacgcgcgtagatgaaccgccttcttatgaggaagcaacgaagcttggaatgcccaccactagaccgatagccccaatggccaccggggtgatgaaaccttctcagttgcatcgacccgtcaccttggatttgccccctccccctgctgctactgctgtacccgcttctaagcctgtcgctgccccgaaaccagtcgccgtagccaggtcacgtcccgggggcgctcctcgtccaaatgcgcactggcaaaatactctgaacagcatcgtgggtctaggcgtgcaaagtgtaaaacgccgtcgctgcttttaattaaatatggagtagcgcttaacttgcctatctgtgtatatgtgtcattacacgccgtcacagcagcagaggaaaaaaggaagaggtcgtgcgtcgacgctgagttactttcaagatggccaccccatcgatgctgccccaatgggcatacatgcacatcgccggacaggatgcttcggagtacctgagtccgggtctggtgcagttcgcccgcgccacagacacctacttcaatctgggaaataagtttagaaatcccaccgtagcgccgacccacgatgtgaccaccgaccgtagccagcggctcatgttgcgcttcgtgcccgttgaccgggaggacaatacatactcttacaaagtgcggtacaccctggccgtgggcgacaacagagtgctggatatggccagcacgttctttgacattaggggtgtgttggacagaggtcccagtttcaaaccctattctggtacggcttacaactccctggctcctaaaggcgctccaaatacatctcagtggattgcagaaggtgtaaaaaatacaactggtgaggaacacgtaacagaagaggaaaccaatactactacttacacttttggcaatgctcctgtaaaagctgaagctgaaattacaaaagaaggactcccagtaggtttggaagtttcagatgaagaaagtaaaccgatttatgctgataaaacatatcagccagaacctcagctgggagatgaaacttggactgaccttgatggaaaaaccgaaaagtatggaggcagggctctcaaacccgatactaagatgaaaccatgctacgggtcctttgccaaacctactaatgtgaaaggcggtcaggcaaaacaaaaaacaacggagcagccaaatcagaaagtcgaatatgatatcgacatggagttttttgatgcggcatcgcagaaaacaaacttaagtcctaaaattgtcatgtatgcagaaaatgtaaatttggaaactccagacactcatgtagtgtacaaacctggaacagaagacacaagttccgaagctaatttgggacaacaatctatgcccaacagacccaactacattggcttcagagataactttattggacttatgtactataacagtactggtaacatgggggtgctggctggtcaagcgtctcagttaaatgcagtggttgacttgcaggacagaaacacagaactttcttaccaactcttgcttgactctctgggcgacagaaccagatactttagcatgtggaatcaggctgtggacagttatgatcctgatgtacgtgttattgaaaatcatggtgtggaagatgaacttcccaactactgttttccactggacggcataggtgttccaacaaccagttacaaatcaatagttccaaatggagacaatgcgcctaattggaaggaacctgaagtaaatggaacaagtgagatcggacagggtaatttgtttgccatggaaattaaccttcaagccaatctatggcgaagtttcctttattccaatgtggctctatatctcccagactcgtacaaatacaccccgtccaatgtcactcttccagaaaacaaaaacacctacgactacatgaacgggcgggtggtgccgccatctctagtagacacctatgtgaacattggtgccaggtggtctctggatgccatggacaatgtcaacccattcaaccaccaccgtaacgctggcttgcgttaccgatccatgcttctgggtaacggacgttatgtgcctttccacatacaagtgcctcaaaaattcttcgctgttaaaaacctgctgcttctcccaggctcctacacttatgagtggaactttaggaaggatgtgaacatggttctacagagttccctcggtaacgacctgcgggtagatggcgccagcatcagtttcacgagcatcaacctctatgctacttttttccccatggctcacaacaccgcttccacccttgaagccatgctgcggaatgacaccaatgatcagtcattcaacgactacctatctgcagctaacatgctctaccccattcctgccaatgcaaccaatattcccatttccattccttctcgcaactgggcggctttcagaggctggtcatttaccagactgaaaaccaaagaaactccctctttggggtctggatttgacccctactttgtctattctggttctattccctacctggatggtaccttctacctgaaccacacttttaagaaggtttccatcatgtttgactcttcagtgagctggcctggaaatgacaggttactatctcctaacgaatttgaaataaagcgcactgtggatggcgaaggctacaacgtagcccaatgcaacatgaccaaagactggttcttggtacagatgctcgccaactacaacatcggctatcagggcttctacattccagaaggatacaaagatcgcatgtattcatttttcagaaacttccagcccatgagcaggcaggtggttgatgaggtcaattacaaagacttcaaggccgtcgccataccctaccaacacaacaactctggctttgtgggttacatggctccgaccatgcgccaaggtcaaccctatcccgctaactatccctatccactcattggaacaactgccgtaaatagtgttacgcagaaaaagttcttgtgtgacagaaccatgtggcgcataccgttctcgagcaacttcatgtctatgggggcccttacagacttgggacagaatatgctctatgccaactcagctcatgctctggacatgacctttgaggtggatcccatggatgagcccaccctgctttatcttctcttcgaagttttcgacgtggtcagagtgcatcagccacaccgcggcatcatcgaggcagtctacctgcgtacaccgttctcggccggtaacgctaccacgtaagaagcttcttgcttcttgcaaatagcagctgcaaccatggcctgcggatcccaaaacggctccagcgagcaagagctcagagccattgtccaagacctgggttgcggaccctattttttgggaacctacgataagcgcttcccggggttcatggcccccgataagctcgcctgtgccattgtaaatacggccggacgtgagacggggggagagcactggttggctttcggttggaacccacgttctaacacctgctacctttttgatccttttggattctcggatgatcgtctcaaacagatttaccagtttgaatatgagggtctcctgcgccgcagcgctcttgctaccaaggaccgctgtattacgctggaaaaatctacccagaccgtgcagggtccccgttctgccgcctgcggacttttctgctgcatgttccttcacgcctttgtgcactggcctgaccgtcccatggacggaaaccccaccatgaaattgctaactggagtgccaaacaacatgcttcattctcctaaagtccagcccaccctgtgtgacaatcaaaaagcactctaccattttcttaatacccattcgccttattttcgctcccatcgtacacacatcgaaagggccactgcgttcgaccgtatggatgttcaataatgactcatgtaaacaacgtgttcaataaacatcactttatttttttacatgtatcaaggctctgcattacttatttatttacaagtcgaatgggttctgacgagaatcagaatgacccgcaggcagtgatacgttgcggaactgatacttgggttgccacttgaattcgggaatcaccaacttgggaaccggtatatcgggcaggatgtcactccacagctttctggtcagctgcaaagctccaagcaggtcaggagccgaaatcttgaaatcacaattaggaccagtgctttgagcgcgagagttgcggtacaccggattgcagcactgaaacaccatcagcgacggatgtctcacgcttgccagcacggtgggatctgcaatcatgcccacatccagatcttcagcattggcaatgctgaacggggtcatcttgcaggtctgcctacccatggcgggcacccaattaggcttgtggttgcaatcgcagtgcagggggatcagtatcatcttggcctgatcctgtctgattcctggatacacggctctcatgaaagcatcatattgcttgaaagcctgctgggctttactaccctcggtataaaacatcccgcaggacctgctcgaaaactggttagctgcacagccggcatcattcacacagcagcgggcgtcattgttagctatttgcaccacacttctgccccagcggttttgggtgattttggttcgctcgggattctcctttaaggctcgttgtccgttctcgctggccacatccatctcgataatctgctccttctgaatcataatattgccatgcaggcacttcagcttgccctcataatcattgcagccatgaggccacaacgcacagcctgtacattcccaattatggtgggcgatctgagaaaaagaatgtatcattccctgcagaaatcttcccatcatcgtgctcagtgtcttgtgactagtgaaagttaactggatgcctcggtgctcctcgtttacgtactggtgacagatgcgcttgtattgttcgtgttgctcaggcattagtttaaaagaggttctaagttcgttatccagcctgtacttctccatcagcagacacatcacttccatgcctttctcccaagcagacaccaggggcaagctaatcggattcttaacagtgcaggcagcagctcctttagccagagggtcatctttagcgatcttctcaatgcttcttttgccatccttctcaacgatgcgcacgggcgggtagctgaaacccactgctacaagttgcgcctcttctctttcttcttcgctgtcttgactgatgtcttgcatggggatatgtttggtcttccttggcttctttttggggggtatcggaggaggaggactgtcgctccgttccggagacagggaggattgtgacgtttcgctcaccattaccaactgactgtcggtagaagaacctgaccccacacggcgacaggtgtttctcttcgggggcagaggtggaggcgattgcgaagggctgcggtccgacctggaaggcggatgactggcagaaccccttccgcgttcgggggtgtgctccctgtggcggtcgcttaactgatttccttcgcggctggccattgtgttctcctaggcagagaaacaacagacatggaaactcagccattgctgtcaacatcgccacgagtgccatcacatctcgtcctcagcgacgaggaaaaggagcagagcttaagcattccaccgcccagtcctgccaccacctctaccctagaagataaggaggtcgacgcatctcatgacatgcagaataaaaaagcgaaagagtctgagacagacatcgagcaagacccgggctatgtgacaccggtggaacacgaggaagagttgaaacgctttctagagagagaggatgaaaactgcccaaaacaacgagcagataactatcaccaagatgctggaaatagggatcagaacaccgactacctcatagggcttgacggggaagacgcgctccttaaacatctagcaagacagtcgctcatagtcaaggatgcattattggacagaactgaagtgcccatcagtgtggaagagctcagccgcgcctacgagcttaacctcttttcacctcgtactccccccaaacgtcagccaaacggcacctgcgagccaaatcctcgcttaaacttttatccagcttttgctgtgccagaagtactggctacctatcacatcttttttaaaaatcaaaaaattccagtctcctgccgcgctaatcgcacccgcgccgatgccctactcaatctgggacctggttcacgcttacctgatatagcttccttggaagaggttccaaagatcttcgagggtctgggcaataatgagactcgggccgcaaatgctctgcaaaagggagaaaatggcatggatgagcatcacagcgttctggtggaattggaaggcgataatgccagactcgcagtactcaagcgaagcatcgaggtcacacacttcgcatatcccgctgtcaacctgccccctaaagtcatgacggcggtcatggaccagttactcattaagcgcgcaagtcccctttcagaagacatgcatgacccagatgcctgtgatgagggtaaaccagtggtcagtgatgagcagctaacccgatggctgggcaccgactctcccagggatttggaagagcgtcgcaagcttatgatggccgtggtgctggttaccgtagaactagagtgtctccgacgtttctttaccgattcagaaaccttgcgcaaactcgaagagaatctgcactacacttttagacacggctttgtgcggcaggcatgcaagatatctaacgtggaactcaccaacctggtttcctacatgggtattctgcatgagaatcgcctaggacaaagcgtgctgcacagcaccctgaagggggaagcccgccgtgattacatccgcgattgtgtctatctgtacctgtgccacacgtggcaaaccggcatgggtgtatggcagcaatgtttagaagaacagaacttgaaagagcttgacaagctcttacagaaatctcttaaggttctgtggacagggttcgacgagcgcaccgtcgcttccgacctggcagacctcatcttcccagagcgtctcagggttactttgcgaaacggattgcctgactttatgagccagagcatgcttaacaattttcgctctttcatcctggaacgctccggtatcctgcccgccacctgctgcgcactgccctccgactttgtgcctctcacctaccgcgagtgccccccgccgctatggagtcactgctacctgttccgtctggccaactatctctcctaccactcggatgtgatcgaggatgtgagcggagacggcttgctggagtgtcactgccgctgcaatctgtgcacgccccaccggtccctagcttgcaacccccagttgatgagcgaaacccagataataggcacctttgaattgcaaggccccagcagccaaggcgatgggtcttctcctgggcaaagtttaaaactgaccccgggactgtggacctccgcctacttgcgcaagtttgctccggaagattaccacccctatgaaatcaagttctatgaggaccaatcacagcctccaaaggccgaactttcggcctgcgtcatcacccagggggcaattctggcccaattgcaagccatccaaaaatcccgccaagaatttctactgaaaaagggtaagggggtctaccttgacccccagaccggcgaggaactcaacacaaggttccctcaggatgtcccaacgacgagaaaacaagaagttgaaggtgcagccgccgcccccagaagatatggaggaagattgggacagtcaggcagaggaggcggaggaggacagtctggaggacagtctggaggaagacagtttggaggaggaaaacgaggaggcagaggaggtggaagaagtaaccgccgacaaacagttatcctcggctgcggagacaagcaacagcgctaccatctccgctccgagtcgaggaacccggcggcgtcccagcagtagatgggacgagaccggacgcttcccgaacccaaccagcgcttccaagaccggtaagaaggatcggcagggatacaagtcctggcgggggcataagaatgccatcatctcctgcttgcatgagtgcgggggcaacatatccttcacgcggcgctacttgctattccaccatggggtgaactttccgcgcaatgttttgcattactaccgtcacctccacagcccctactatagccagcaaatcccggcagtctcgacagataaagacagcggcggcgacctccaacagaaaaccagcagcggcagttagaaaatacacaacaagtgcagcaacaggaggattaaagattacagccaacgagccagcgcaaacccgagagttaagaaatcggatctttccaaccctgtatgccatcttccagcagagtcggggtcaagagcaggaactgaaaataaaaaaccgatctctgcgttcgctcaccagaagttgtttgtatcacaagagcgaagatcaacttcagcgcactctcgaggacgccgaggctctcttcaacaagtactgcgcgctgactcttaaagagtaggcagcgaccgcgcttattcaaaaaaggcgggaattacatcatcctcgacatgagtaaagaaattcccacgccttacatgtggagttatcaaccccaaatgggattggcggcaggcgcctcccaggactactccacccgcatgaattggctcagcgccgggccttctatgatttctcgagttaatgatatacgcgcctaccgaaaccaaatacttttggaacagtcagctcttaccaccacgccccgccaacaccttaatcccagaaattggcccgccgccctagtgtaccaggaaagtcccgctcccaccactgtattacttcctcgagacgcccaggccgaagtccaaatgactaatgcaggtgcgcagttagctggcggctccaccctatgtcgtcacaggcctcggcataatataaaacgcctgatgatcagaggccgaggtatccagctcaacgacgagtcggtgagctctccgcttggtctacgaccagacggaatctttcagattgccggctgcgggagatcttccttcacccctcgtcaggctgttctgactttggaaagttcgtcttcgcaaccccgctcgggcggaatcgggaccgttcaatttgtggaggagtttactccctctgtctacttcaaccccttctccggatctcctgggcattacccggacgagttcataccgaacttcgacgcgattagcgagtcagtggacggctacgattgatgtctggtgacgcggctgagctatctcggctgcgacatctagaccactgccgccgctttcgctgctttgcccgggaactcattgagttcatctacttcgaactccccaaggatcaccctcaaggtccggcccacggagtgcggatttctatcgaaggcaaaatagactctcgcctgcaacgaattttctcccagcggcccgtgctgatcgagcgagaccagggaaacaccacggtttccatctactgcatttgtaatcaccccggattgcatgaaagcctttgctgtcttatgtgtactgagtttaataaaaactgaattaagactctcctacggactgccgcttcttcaacccggattttacaaccagaagaacgaaacttttcctgtcgtccaggactctgttaacttcacctttcctactcacaaactagaagctcaacgactacaccgcttttccagaagcattttccctactaatactactttcaaaaccggaggtgagctccaaggtcttcctacagaaaacccttgggtggaagcgggccttgtagtgctaggaattcttgcgggtgggcttgtgattattctttgctacctatacacaccttgcttcactttcttagtggtgttgtggtattggtttaaaaaatggggcccatactagtcttgcttgttttactttcgcttttggaaccgggttctgccaattacgatccatgtctagacttcgacccagaaaactgcacacttacttttgcacccgacacaagccgcatctgtggagttcttattaagtgcggatgggaatgcaggtccgttgaaattacacacaataacaaaacctggaacaataccttatccaccacatgggagccaggagttcccgagtggtacactgtctctgtccgaggtcctgacggttccatccgcattagtaacaacactttcattttttctgaaatgtgcgatctggccatgttcatgagcaaacagtattctctatggcctcctagcaaggacaacatcgtaacgttctccattgcttattgcttgtgcgcttgccttcttactgctttactgtgcgtatgcatacacctgcttgtaaccactcgcatcaaaaacgccaataacaaagaaaaaatgccttaacctctttctgtttacagacatggcttctcttacatctctcatatttgtcagcattgtcactgccgctcatggacaaacagtcgtctctatccctctaggacataattacactctcataggacccccaatcacttcagaggtcatctggaccaaactgggaagcgttgattactttgatataatctgcaacaaaacaaaaccaataatagtaacttgcaacatacaaaatcttacattgattaatgttagcaaagtttacagcggttactattatggttatgacagatacagtagtcaatatagaaattacttggttcgtgttacccagttgaaaaccacgaaaatgccaaatatggcaaagattcgatccgatgacaattctctagaaacttttacatctcccaccacacccgacgaaaaaaacatcccagattcaatgattgcaattgttgcagcggtggcagtggtgatggcactaataataatatgcatgcttttatatgcttgtcgctacaaaaagtttcatcctaaaaaacaagatctcctactaaggcttaacatttaatttctttttatacagccatggtttccactaccacattccttatgcttactagtctcgcaactctgacttctgctcgctcacacctcactgtaactataggctcaaactgcacactaaaaggacctcaaggtggtcatgtcttttggtggagaatatatgacaatggatggtttacaaaaccatgtgaccaacctggtagatttttctgcaacggcagagacctaaccattatcaacgtgacagcaaatgacaaaggcttctattatggaaccgactataaaagtagtttagattataacattattgtactgccatctaccactccagcaccccgcacaactactttctctagcagcagtgtcgctaacaatacaatttccaatccaacctttgccgcgcttttaaaacgcactgtgaataattctacaacttcacatacaacaatttccacttcaacaatcagcattatcgctgcagtgacaattggaatatctattcttgtttttaccataacctactacgcctgctgctatagaaaagacaaacataaaggtgatccattacttagatttgatatttaatttgttctttttttttttatttacagtatggtgaacaccaatcatggtacctagaaatttcttcttcaccatactcatttgtgcatttaatgtttgcgctactttcacagcagtagccacagcaaccccagactgtataggagcatttgcttcctatgcactttttgcttttgttacttgcatctgcgtatgtagcatagtctgcctggttattaattttttccaacttatagactggatccttgtgcgaattgcctacctgcgccaccatcccgaataccgcaaccaaaatatcgcggcacttcttagactcatctaaaaccatgcaggctatactaccaatatttttgcttctattgcttccctacgctgtctcaaccccagctgcctatagtactccaccagaacaccttagaaaatgcaaattccaacaaccgtggtcatttcttgcttgctatcgagaaaaatcagaaattcccccaaatttaataatgattgctggaataattaatataatctgttgcaccataatttcatttttgatataccccctatttgattttggctggaatgctcccaatgcacatgatcatccacaagacccagaggaacacattcccctacaaaacatgcaacatccaatagcgctaatagattacgaaagtgaaccacaacccccactactccctgctattagttacttcaacctaaccggcggagatgactgaaacactcaccacctccaattccgccgaggatctgctcgatatggacggccgcgtctcagaacagcgactcgcccaactacgcatccgccagcagcaggaacgcgcggccaaagagctcagagatgtcatccaaattcaccaatgcaaaaaaggcatattctgtttggtaaaacaagccaagatatcctacgagatcaccgctactgaccatcgcctctcttacgaacttggcccccaacgacaaaaatttacctgcatggtgggaatcaaccccatagttatcacccagcaaagtggagatactaagggttgcattcactgctcctgcgattccatcgagtgcacctacaccctgctgaagaccctatacggcctaagagacctgctaccaatgaattaaaaaatgattaataaaaaatcacttacttgaaatcagcaataaggtctctgttgaaattttctcccagcagcacctcacttccctcttcccaactctggtattctaaaccccgttcagcggcatactttctccatactttaaaggggatgtcaaattttagctcctctcctgtacccacaatcttcatgtctttcttcccagatgaccaagagagtccggctcagtgactccttcaaccctgtctacccctatgaagatgaaagcacctcccaacacccctttataaacccagggtttatttccccaaatggcttcacacaaagcccaaacggagttcttactttaaaatgtttaaccccactaacaaccacaggcggatctctacagctaaaagtgggagggggacttacagtggatgacaccaacggttttttgaaagaaaacataagtgccaccacaccactcgttaagactggtcactctataggtttaccactaggagccggattgggaacgaatgaaaataaactttgtatcaaattaggacaaggacttacattcaattcaaacaacatttgcattgatgacaatattaacaccttatggacaggagtcaaccccaccgaagccaactgtcaaatcatgaactccagtgaatctaatgattgcaaattaattctaacactagttaaaactggagcactagtcactgcatttgtttatgttataggagtatctaacaattttaatatgctaactacacacagaaatataaattttactgcagagctgtttttcgattctactggtaatttactaactagactctcatccctcaaaactccacttaatcataaatcaggacaaaacatggctactggtgccattactaatgctaaaggtttcatgcccagcacgactgcctatcctttcaatgataattctagagaaaaagaaaactacatttacggaacttgttactacacagctagtgatcgcactgcttttcccattgacatatctgtcatgcttaaccgaagagcaataaatgacgagacatcatattgtattcgtataacttggtcctggaacacaggagatgccccagaggtgcaaacctctgctacaaccctagtcacctccccatttaccttttactacatcagagaagacgactgacaaataaagtttaacttgtttatttgaaaatcaattcacaaaatccgagtagttattttgcctcccccttcccatttaacagaatacaccaatctctccccacgcacagctttaaacatttggataccattagatatagacatggttttagattccacattccaaacagtttcagagcgagccaatctggggtcagtgatagataaaaatccatcgggatagtcttttaaagcgctttcacagtccaactgctgcggatgcgactccggagtctggatcacggtcatctggaagaagaacgatgggaatcataatccgaaaacggtatcggacgattgtgtctcatcaaacccacaagcagccgctgtctgcgtcgctccgtgcgactgctgtttatgggatcagggtccacagtgtcctgaagcatgattttaatagcccttaacatcaactttctggtgcgatgcgcgcagcaacgcattctgatttcactcaaatctttgcagtaggtacaacacattattacaatattgtttaataaaccataattaaaagcgctccagccaaaactcatatctgatataatcgcccctgcatgaccatcataccaaagtttaatataaattaaatgacgttccctcaaaaacacactacccacatacatgatctcttttggcatgtgcatattaacaatctgtctgtaccatggacaacgttggttaatcatgcaacccaatataaccttccggaaccacactgccaacaccgctcccccagccatgcattgaagtgaaccctgctgattacaatgacaatgaagaacccaattctctcgaccgtgaatcacttgagaatgaaaaatatctatagtggcacaacatagacataaatgcatgcatcttctcataatttttaactcctcaggatttagaaacatatcccagggaataggaagctcttgcagaacagtaaagctggcagaacaaggaagaccacgaacacaacttacactatgcatagtcatagtatcacaatctggcaacagcgggtggtcttcagtcatagaagctcgggtttcattttcctcacaacgtggtaactgggctctggtgtaagggtgatgtctggcgcatgatgtcgagcgtgcgcgcaaccttgtcataatggagttgcttcctgacattctcgtattttgtatagcaaaacgcggccctggcagaacacactcttcttcgccttctatcctgccgcttagcgtgttccgtgtgatagttcaagtacaaccacactcttaagttggtcaaaagaatgctggcttcagttgtaatcaaaactccatcgcatctaatcgttctgaggaaatcatccacggtagcatatgcaaatcccaaccaagcaatgcaactggattgtgtttcaagcaggagaggagagggaagagacggaagaaccatgttaatttttattccaaacgatctcgcagtacttcaaattgtagatcgcgcagatggcatctctcgcccccactgtgttggtgaaaaagcacagctagatcaaaagaaatgcgattttcaaggtgctcaacggtggcttccagcaaagcctccacgcgcacatccaagaacaaaagaataccaaaagaaggagcattttctaactcctcaatcatcatattacattcctgcaccattcccagataattttcagctttccagccttgaattattcgtgtcagttcttgtggtaaatccaatccacacattacaaacaggtcccggagggcgccctccaccaccattcttaaacacaccctcataatgacaaaatatcttgctcctgtgtcacctgtagcgaattgagaatggcaacatcaattgacatgcccttggctctaagttcttctttaagttctagttgtaaaaactctctcatattatcaccaaactgcttagccagaagccccccgggaacaagagcaggggacgctacagtgcagtacaagcgcagacctccccaattggctccagcaaaaacaagattggaataagcatattgggaaccgccagtaatatcatcgaagttgctggaaatataataaggcagagtttcttgtaaaaattgaataaaagaaaaatttgccaaaaaaacattcaaaacctctgggatgcaaatgcaataggttaccgcgctgcgctccaacattgttagttttgaattagtctgcaaaaataaaaaaaaaaacaagcgtcatatcatagtagcctgacgaacagatggataaatcagtctttccatcacaagacaagccacagggtctccagctcgaccctcgtaaaacctgtcatcatgattaaacaacagcaccgaaagttcctcgcggtgaccagcatgaataattcttgatgaagcatacaatccagacatgttagcatcagttaacgagaaaaaacagccaacatagcctttgggtataattatgcttaatcgtaagtatagcaaagccacccctcgcggatacaaagtaaaaggcacaggagaataaaaaatataattatttctctgctgctgttcaggcaacgtcgcccccggtccctctaaatacacatacaaagcctcatcagccatggcttaccagacaaagtacagcgggcacacaaagcacaagctctaaagtgactctccaacctctccacaatatatatatacacaagccctaaactgacgtaatgggagtaaagtgtaaaaaatcccgccaaacccaacacacaccccgaaactgcgtcaccagggaaaagtacagtttcacttccgcaatcccaacaggcgtaacttcctctttctcacggtacgtgatatcccactaacttgcaacgtcattttcccacggtcgcaccgccccttttagccgttaaccccacagccaatcaccacacgatccacactttttaaaatcacctcatttacatattggcaccattccatctataaggtatattattgatgatg

SEQ ID NO: 139 - DNA, 35343 bp, Human adenovirus type 3
ctatctatataatataccttatagatggaatggtgccaacatgtaaatgaggtaatttaaaaaagtgcgcgctgtgtggtgattggctgcggggttaacggctaaaaggggcggcgcgaccgtgggaaaatgacgtgacttatgtgggaggagttatgttgcaagttattacggtaaatgtgacgtaaaacgaggtgtggtttgaacacggaagtagacagttttcccacgcttactgacaggatatgaggtagttttgggcggatgcaagtgaaaattctccattttcgcgcgaaaactaaatgaggaagtgaatttctgagtcatttcgcggttatgccagggtggagtatttgccgagggccgagtagactttgaccgtttacgtggaggtttcgattaccgtgtttttcacctaaatttccgcgtacggtgtcaaagttctgtgtttttacgtaggtgtcagctgatcgctagggtatttaaacctgacgagttccgtcaagaggccactcttgagtgccagcgagaagagttttctcctccgcgccgcaagtcagttctgcgctttgaaaatgagacacctgcgcttcctgccacaggaggttatctccagtgagaccgggatcgaaatactggagtttgtggtaaataccctaatgggagacgacccggaaccgccagtgcagcctttcgatccacctacgctgcacgatctgtatgatttagagatagacgggccggaggatcccaatgaggaagctgtgaatgggttttttactgattctatgctgctagctgctgatgaaggattggacataaaccctcctcctgagacacttgttaccccaggggtggttgtggaaagcggcataggtgggaaaaaattgcctgatctgggagcagctgaaatggacttgcgttgttatgaagagggttttcctcccagtgatgatgaagatggggaaactgagcagtccatccataccgcagtaaatgagggagtaaaagctgccagcgatgtttttaagttggactgtccggagctgcctggacatggctgtaagtcttgtgaatttcacaggaataacactggaatgaaagaactattgtgctcgctttgctatatgagaatgcactgccactttatttacagtaagtgtatttaagtgaaatttaaaggaatagtgtagctatttaataactgttgaatggtagatttatgtttttttcttgcgattttttgtaggtcctgtgtctgatgatgagtcaccttctcctgattcaactacctcacctcctgaaattcaggcgcccgcacctgcaaacgtatgcaagcccattcctgtgaagcctaagcctgggaaacgccctgctgtggataagcttgaggacttgttggagggtggggatggacctttggaccttagtacccggaaactgccaaggcaatgagtgccctgcagctgtgtttatttaatgtgacgtcatgtaataaaattatgtcagctgctgagtgttttattacttcttgggtggggacttggatatataagtaggagcagatctgtgtggttagctcacagcaacctgctgccatccatggaggtttgggctatcttggaagacctcagacagactaagctactgctagaaaacgcctcggacggagtctctggcctttggagattctggttcggtggtgatctagctaggctagtgtttaggataaaacaggactacagggaagaatttgaaaagttattggacgatagtccgggactttttgaagctcttaacttgggtcatcaggctcattttaaggagaaggttttatcagttttagatttttctactcctggtagaactgctgctgctgtagcttttcttacttttatattggataaatggatccgccaaactcacttcagcaagggatacgttttggatttcatagcagcagctttgtggagaacatggaaggctcgcaggatgaggacaatcttagattactggccagtgcagcctctgggagtagcagggatactgagacacccaccgaccatgccagcggttctgcaggaggagcagcaggaggacaatccgagagccggcctggaccctccggtggaggagtagctgacctgtttcctgaactgcgacgggtgcttactaggtctacgaccagtggacagaacaggggaattaagagggagaggaatcctagtgggaataattcaagaaccgagttggctttaagtttaatgagccgcaggcgtcctgaaactgtttggtggcatgaggttcagagcgaaggcagggatgaagtttcaatattgcaggagaaatattcactagaacaacttaagacctgttggttggaacctgaggatgattgggaggtggccattaggaattatgctaagatatctctgaggcctgataaacaatatagaattactaagaagattaatattagaaatgcatgctacatatcagggaatggggcagaggttataatagatacacaagataaagcagtttttagatgttgtatgatgggtatgtggccaggggttgtcggcatggaagcagtaacacttatgaatattaggtttaaaggggatgggtataatggcattgtatttatggctaacactaagctgattctacatggttgtagcttttttgggtttaataatacgtgtgtagaagcttgggggcaagttagtgtgaggggttgtagtttttatgcatgctggattgcaacatcaggtagggtcaagagtcagttgtctgtgaagaaatgcatgtttgagagatgtaatcttggcatactgaatgaaggtgaagcaagggtccgccactgcgcagctacagaaactggctgcttcattctaataaagggaaatgccagtgtgaagcataatatgatctgtggacattcggatgagaggccttatcagatgctgacctgcgctggtggacattgcaatattcttgctaccgtgcatatcgtttcacatgcacgcaaaaaatggcctgtatttgaacataatgtgattaccaagtgcaccatgcacataggtggtcgcaggggaatgtttatgccttaccagtgtaacatgaatcatgtgaaggtaatgttggaaccagatgccttttccagagtgagcttaacaggaatctttgatatgaatattcaactatggaagatcctgagatatgatgacactaaaccaagggtgcgcgcatgcgaatgcggaggcaagcatgctagattccagccggtgtgcgtggatgtgactgaagacttgagacccgatcatttggtgcttgcctgcactggagcggagttcggttctagtggtgaagaaactgactaaagtgagtagtggggcaagatgtggatggggactttcaggttggtaaggtgggcagattgggtaaattttgttaatttctgtcttgcagctgccatgagtggaagcgcttcttttgaggggggagtatttagcccttatctgacgggcaggctcccaccatgggcaggagttcgtcagaatgtcatgggatccactgtggatgggagacccgtccagcccgccaattcctcaacgctgacctatgccactttgagttcgtcaccattggatgcagctgcagccgccgccgctactgctgccgccaacaccatccttggaatgggctattatggaagcatcgttgccaattccagttcctctaataacccttcaaccctggctgaggacaagctacttgttctcttggcgcagctcgaggccttaacccaacgcttaggcgaactgtctaagcaggtggcccagttgcgtgagcaaactgagtctgctgttgccacagcaaagtctaaataaagatctcaaatcaataaataaagaaatacttgatataaaacaaatgaatgtttatttgatttttcgcgcgcggtatgccctggaccatcggtctcgatcattgagaacgcggtggatcttttccagtaccctgtaaaggtgggattgaatgtttagatacatgggcattagtccgtctcgggggtggagatagctccattgaagagcctcttgctccggggtagtgttataaatcacccagtcatagcaaggtcggagtgcatggtgttgcacaatatcttttaggagcagactaattgcaacggggaggcccttagtgtaggtgtttacaaatctgttgagctgggacgggtgcatccggggtgaaattatatgcattttggactggatcttgaggttggcaatgttgccgcctagatcccgtctcgggttcatattgtgcaggaccaccaagacagtgtatccggtgcacttgggaaatttatcatgcagcttagagggaaaagcatgaaaaaatttggagacgcctttgtgaccccccagattctccatgcactcatccataatgatagcgatggggccgtgggcagcggcacgggcgaacacgttccgggggtctgaaacatcatagttatgctcctgagtcaggtcatcataagccattttaataaactttgggcggagggtgccagattgggggatgaaagttccctctggcccgggagcatagtttccctcacatatttgcatttcccaggctttcagttcagagggggggatcatgtccacctgcggggctataaaaaataccgtttctggagccggggtgattaactgggacgagagcaaattcctaagcagctgagacttgccgcacccagtgggaccgtaaatgaccccaattacgggttgcagatggtagtttagggaacgacagctgccgtcctcccggagcaggggggccacttcgttcatcatttcccttacatggatattttcccgcaccaagtccgttaggaggcgctctcccccaagggatagaagctcctggagcgaggagaagtttttcagcggcttcagcccgtcagccatgggcattttggaaagagtctgttgcaagagctcgagccggtcccagagctcggtgatgtgctctatggcatctcgatccagcagacctcctcgtttcgcgggttgggacggctcctggagtagggaatcagacgatgggcgtccagcgctgccagggtccgatccttccatggtcgcagcgtccgagtcagggttgtttccgtcacggtgaaggggtgcgcgcctggttgggcgcttgcgagggtgcgcttcagactcatcctgctggtcgagaaccgctgccgattggcgccctgcatgtcggccaggtagcagtttaccatgagttcgtagttgagcgcctcggccgcgtggcctttggcacggagcttacctttggaagttttatggcaggcggggcagtagatacatttgagggcatacaacttgggcgcgaggaaaatggattcgggggagtatgcatccgcaccgcaggaggcgcagacggtttcgcactccacgagccaggtcagatccggctcatcggggtcaaaaacaagttttccgccatgttttttgatgcgtttcttacctttggtttccatgagttcgtgtccccgctgggtgacaaagaggctgtccgtgtccccgtagaccgactttatgggcctgtcctcgagcggagtgcctcggtcctcttcgtagaggaacccagcccactctgatacaaaagcgcgtgtccaggccagcacaaaggaggccacgtgggaggggtagcggtcgttgtcaaccagggggtccaccttctctacggtatgtaaacacatgtccccctcctccacatccaagaatgtgattggcttgtaagtgtaggccacgtgaccaggggtccccgccgggggggtataaaagggggcgggcctctgttcgtcctcactgtcttccggatcgctgtccaggagcgccagctgttggggtaggtattccctctcgaaggcgggcatgacctctgcactcaggttgtcagtttctaggaacgaggaggatttgatattgacagtaccagcagagatgcctttcataagactctcgtccatctggtcagaaaacacaatcttcttgttgtccagcttggtggcaaatgatccatagagggcattggatagaagcttggcgatggagcgcatggtttggttcttttccttgtccgcgcgctccttggcggtgatgttaagctggacgtactcgcgcgccacacatttccattcaggaaagatggttgtcagttcatccggaactattctgattcgccatcccctattgtgcagggttatcagatccacactggtggccacctcgcctcggaggggctcattggtccagcagagtcgacctccttttcttgaacagaaaggggggagggggtctagcatgaactcatcaggggggtccgcatctatggtaaatattcccggtagcaaatctttgtcaaaatagctgatggtggcgggatcatccaaggtcatctgccattctcgaactgccagcgcgcgctcataggggttaagaggggtgccccagggcatggggtgggtgagcgcggaggcatacatgccacagatatcgtagacatagaggggctcttcgaggatgccgatgtaagtgggataacatcgcccccctctgatgcttgctcgcacatagtcatagagttcatgtgagggggcaagaagacccgggcccagattggtgcggttgggtttttccgccctgtaaacgatctggcgaaagatggcatgggaattggaagagatagtaggtctctggaatatgttaaaatgggcatgaggtaagcctacagagtcccttatgaagtgggcatatgactcttgcagcttggctaccagctcggcggtgatgagtacatccagggcacagtagtcgagagtttcctggatgatgtcataacgcggttggcttttcttttcccacagctcgcggttgagaaggtattcttcgtgatccttccagtactcttcgaggggaaacccgtctttttctgcacggtaagagcccaacatgtagaactgattgactgccttgtagggacagcatcccttctccactgggagagagtatgcttgggctgcattgcgcagcgaggtatgagtgagggcaaaagtgtccctgaccatgactttgaggaattgatacttgaagtcgatgtcatcacaggccccctgttcccagagttggaagtccacccgcttcttgtaggcggggttgggcaaagcgaaagtaacatcattgaagaggatcttgccggccctgggcatgaaatttcgggtgattttgaaaggctgaggaacctctgctcggttattgataacctgagcggccaagacgatctcatcaaagccattgatgttgtgccccactatgtacagttctaagaatcgaggggtgcccctgacatgaggcagcttcttgagttcttcaaaagtgagatctgtagggtcagtgagagcatagtgttcgagggcccattcgtgcacgtgagggttcgctttaaggaaggaggaccagaggtccactgccagtgctgtttgtaactggtcccggtactgacgaaaatgctgtccgactgccatcttttctggggtgacgcaatagaaggtttgggggtcctgccgccagcgatcccacttgagttttatggcgaggtcataggcgatgttgacgagccgctggtctccagagagtttcatgaccagcatgaaggggattagctgcttgccaaaggaccccatccaggtgtaggtttccacatcgtaggtgagaaagagcctttctgtgcgaggatgagagccaatcgggaagaactggatctcctgccaccagttggaggaatggctgttgatgtgatggaagtagaactccctgcgacgcgccgagcattcatgcttgtgcttgtacagacggccgcagtactcgcagcgattcacgggatgcaccttatgaatgagttgtacctgacttcctttgacgagaaatttcagtggaaaattgaggcctggcgcttgtacctcgcgctttactatgttgtctgcatcggcatgaccatcttctgtctcgatggtggtcatgctgacgagccctcgcgggaggcaagtccagacctcggcgcggcaggggcggagctcgaggacgagagcgcgcaggccggagctgtccagggtcctgagacgctgcggagtcaggttagtaggcagtgtcaggagattaacttgcatgatcttttggagggcgtgagggaggttcagatagtacttgatctcaacgggtccgttggtggagatgtcgatggcttgcagggttccgtgtcccttgggcgctaccaccgtgcccttgtttttcattttggacggcggtggctctgttgcttcttgcatgtttagaagcggtgtcgagggcgcgcaccgggcggcaggggcggctcgggacccggcggcatggctggcagtggtacgtcggcgccgcgcgcgggtaggttctggtactgcgccctgagaagactcgcatgcgcgacgacgcggcggttgacatcctggatctgacgcctctgggtgaaagctaccggccccgtgagcttgaacctgaaagagagttcaacagaatcaatctcggtatcgttgacggcggcttgcctaaggatttcttgcacgtcgccagagttgtcctggtaggcgatctcggccatgaactgctcgatctcttcctcttgaagatctccgcggcccgctctctcgacggtggccgcgaggtcgttggagatgcgcccaatgagttgagagaatgcattcatgcccgcctcgttccagacgcggctgtagaccacagcccccacgggatctctcgcgcgcatgaccacctgggcgaggttgagctccacgtggcgggtgaagaccgcatagttgcataggcgctggaaaaggtagttgagtgtggtggcgatgtgctcggtgacgaagaaatacatgatccatcgtctcagcggcatctcgctgacatcgcccagcgcttccaagcgctccatggcctcgtagaagtccacggcaaagttaaaaaactgggagttacgcgcggacacggtcaactcctcttccagaagacggataagttcggcgatggtggtgcgcacctcgcgctcgaaagcccctgggatttcttcctcaatctcttcttcttccactaacatctcttcctcttcaggtggggctgcaggaggagggggaacgcggcgacgccggcggcgcacgggcagacggtcgatgaatctttcaatgacctctccgcggcggcggcgcatggtctcggtgacggcacgaccgttctccctgggtctcagagtgaagacgcctccgcgcatctccctgaagtggtgactgggaggctctccgttgggcagggacaccgcgctgattatgcattttatcaattgccccgtaggtactccgcgcaaggacctgatcgtctcaagatccacgggatctgaaaacctttcgacgaaagcgtctaaccagtcgcaatcgcaaggtaggctgagcactgtttcttgcgggcgggggcggctagacgctcggtcggggttctctctttcttctccttcctcctcttgggagggtgagacgatgctgctggtgatgaaattaaaataggcagttttgagacggcggatggtggcgaggagcaccaggtctttgggtccggcttgttggatacgcaggcgatgagccattccccaagcattatcctgacatctggccagatctttatagtagtcttgcatgagtcgttccacgggcacttcttcttcgcccgctctgccatgcatgcgagtgatcccgaacccgcgcatgggctggacaagtgccaggtccgctacaaccctttcggcgaggatggcttgctgcacctgggtgagggtggcttggaagtcgtcaaagtccacgaagcggtggtaggccccggtgttgattgtgtaggagcagttggccatgactgaccagttgactgtctggtgcccagggcgcacgagctcggtgtacttgaggcgcgagtatgcgcgggtgtcaaagatgtaatcgttgcaggtgcgcaccaggtactggtagccaatgagaaagtgtggcggtggctggcggtacaggggccatcgctctgtagccggggctccgggggcgaggtcttccagcatgaggcggtggtagccgtagatgtacctggacatccaggtgataccggaggcggtggtggatgcacgtgggaactcgcgcacgcggttccagatgttgcgcagcggcatgaagtagttcatggtaggcacggtctggccagtgaggcgcgcgcagtcattgacgctctgtagacacggagaaaacgaaagcgatgagcggctcgactccgtggtctgggggaacgtgaacgggttgggtcgcggtgtaccccggttcgagtccaaagctaagcgatcacgctcggatcggccggagccgcggctaacgtggtattggctatcccgtctcgacccagccgacgaatatccagggtacggagtagagtcgtttttgctgctttttcctggacgtgtgccattgccacgtcaagctttagaacgctcagttctcgggccgtgagtggctcgcgcccgtagtctggagaatcagtcgccagggttgcgttgcggtatgccccggttggagcctaagcgcggctcgtatcggccggtttccgcgacaagcgagggtttggcagccccgttatttccaagaccccgccagccgacttctccagtttacgggagcgagcccttttttttttttttttgtttttgtcgcccagatgcatccagtgctgcgacagatgcgcccccagcaacaggccccttctcagcaacagccacaaaaggctcttcttgctcctgcaactactgcagctgcagccgtgagcggcgcgggacagcccgcctatgatctggacttggaagagggcgagggattggcgcgcctgggggctccatcgcccgagcggcacccgcgggtgcaactaaaaaaggactctcgcgaggcgtacgtgccccagcagaacctgttcagggacaggagcggcgaggagccagaggagatgcgagcatctcgatttaacgcgggtcgcgagctgcgccacggtctggatcgaagacgggtgctgcaagacgaggattttgaggtcgatgaagtcacagggatcagcccagctagggcacatgtggccgcggccaacctagtctcggcctacgagcagaccgtgaaggaggagcgcaacttccaaaaatcttttaacaaccatgtgcgcaccctgatcgcccgcgaggaagtgaccctgggtctgatgcatctgtgggacctgatggaggctatcgcccaaaaccccactagcaaaccactgacagctcagctgtttctggtggttcaacatagcagggacaacgaggcattcagggaggcgttgttgaacatcaccgagcctgatgggagatggctgtatgatctgatcaacatcctgcaaagtattatagtgcaggaacgtagcctgggtttggctgagaaagtggcagctatcaactactcggtcttgagcctgggcaaatactacgctcgcaagatctacaagaccccctacgtacccatagacaaggaggtgaagatagatgggttttacatgcgcatgactctgaaggtgctgactctgagcgacgatctgggggtgtatcgcaatgacaggatgcaccgcgcggtgagcgccagcaggaggcgcgagctgagcgacagagaacttatgcacagcttgcaaagagctctaacgggggccgggactgatggggagaactactttgacatgggagcggatttgcaatggcaacccagtcgcagggccatggaggctgcagggtgtgagcttccttacatagaagaggtggatgaagtcgaggacgaggagggcgagtacttggaagactgatggcgcgacccgtatttttgctagatggaacagcagcaggcaccggaccccgcaatgcgggcggcgctgcagagccagccgtccggcattaactcctcggacgattggacccaggccatgcaacgcataatggcgctgacgacccgcaaccccgaagcctttagacagcaaccccaggccaaccgcctttctgccatactggaggccgtagtgccctcccgctccaaccccacccacgagaaggtcctggctatcgtgaacgcgctggtggagaacaaggccatccgtcccgatgaggccgggctggtatacaatgctctcttggagcgcgtggcccgttacaacagcagcaacgtgcaaaccaacctggaccggatggtgaccgatgtgcgcgaggccgtgtctcagcgcgagcgattccagcgcgacgccaacttggggtcgttggtagcgctaaacgctttcctcagcacccagcccgccaacgtgccccgtggtcagcaagactatacaaactttttgagtgcattgagactcatggtagctgaggtgccccagagcgaggtgtaccagtccgggccagattacttcttccagaccagcagacagggcttgcagacagtgaacctgactcaggctttcaagaacctgaagggtctgtggggagtgcacgccccagtaggggatcgcgcgaccgtgtctagcttgctgactcccaactcccgcctgctgctgctgctggtatccccctttactgacagcggtagcattgaccgcaactcgtacttgggctacctgcttaacctgtatcgcgaggccataggacagagccaggtggacgagcagacctatcaagaaatcacccaagtgagccgcgccctgggtcaggaagacacgggcagtttggaagccaccctgaacttcttgctaaccaaccggtcacagaagatccctcctcagtatgcgcttaccgctgaggaggagcggatcctcagatacgtgcaacagagcgttggactgttcctgatgcaggagggggcgacacctaccgccgcgctggacatgacagctcgaaacatggagcccagcatgtatgctagtaacaggcctttcattaacaaactgctggactacctgcacagggcggccgccatgaactctgattatttcaccaatgctatcctgaacccacactggctgcccccacctggtttctacactggcgagtacgacatgcccgaccccaatgacgggttcctgtgggacgatgtggacagcagcatattttccccgcctcccggttatacagtttggaagaaggaagggggcgatagaagacactcttccgtgtcgctatccggaacggctggtgctgccgcgaccgtgcccgaagctgcaagtcctttccctagcttgcccttttcactaaacagcgttcgcagcagtgaactggggagaataacccgcccgcgcttgatgggcgaggatgagtacttgaatgactctttgctgaggccagagagggaaaagaacttccccaacaatggaatagagagtctggtggataagatgagtagatggaagacctatgcgcaggatcacagagacgagcccaggatcttgggggctacaagcagaccgatccgtagacgccagcgccacgacaggcagatgggtcttgtgtgggacgatgaggactctgccgatgatagcagcgtgttggacttgggtggaagaggagggggcaacccgttcgctcatctgcgtcccagattcgggcgcatgttgtaaaagtgaaagtaaaataaaaaggcaactcaccaaggccatggcgaccgagcgtgcgttcgttcttttttgttatctgtgtctagtacgatgaggagacgagccgtgctaggcggagcggtggtgtatccggagggtcctcctccttcttacgagagcgtgatgcagcaacaggcggcgatgatacagcccccactggaggctcccttcgtacccccacggtacctggcgcctacggaagggagaaacagcattcgttactcggagctgtcgcccctgtacgataccaccaagttgtatctggtggacaacaagtcggcggacatcgcctccctgaactatcagaacgaccacagcaacttcctgaccacggtggtgcagaacaatgactttacccccacggaggctagcacccagaccatcaactttgacgagcggtcgcgatggggcggtcagctgaagaccatcatgcacaccaacatgcccaacgtgaacgagtacatgttcagcaacaagttcaaggcgagggtgatggtgtccagaaaagctcctgaaggtgttacagtaaatgacacctatgatcataaagaggatatcttgaagtatgagtggtttgagttcattttaccagaaggcaacttttcagccaccatgacgatcgacctgatgaacaatgccatcattgacaactacctggaaattggcagacagaatggagtgctggaaagtgacattggtgttaagtttgacactagaaatttcaggctcgggtgggaccccgaaactaagttgattatgccaggtgtctacacttatgaggcattccatcctgacattgtattgctgcctggttgcggggtagactttactgaaagccgacttagcaacttgcttggcatcaggaagagacatccattccaggagggtttcaaaatcatgtatgaagatcttgaagggggtaatattcctgcccttttggatgtcactgcctatgaggaaagcaaaaaggataccactactgaaacaaccacactggctgttgcagaggaaactagtgaagatgatgatataactagaggagatacctatataactgaaaaacaaaaacgtgaagctgcagctgctgaagttaaaaaagagttaaagatccaacctctagaaaaagacagcaagagtagaagctacaatgtcttggaagacaaaatcaacacagcctaccgcagttggtacctgtcctacaattacggtaaccctgagaaaggaataaggtcttggacactgctcaccacttcagatgtcacctgtggggcagagcaggtctactggtcgctccctgacatgatgcaagacccagtcaccttccgctccacaagacaagtcaacaactacccagtggtgggtgcagagcttatgcccgtcttctcaaagagtttctacaatgagcaagccgtgtactctcagcagctccgacaggccacttcgctcacgcacgtcttcaaccgcttccctgagaaccagatcctcatccgcccgccggcgcccacaattaccaccgtcagtgaaaacgttcctgctctcacagatcacgggaccctgccgttacgcagcagtatccggggagtccagcgcgtgaccgttactgacgccagacgccgcacctgtccctacgtttacaaggccctgggcatagtcgcgccgcgcgttctttcaagccgcactttctaaaaaaaaaaaaaatgtccattctcatctcgcccagtaataataccggttggggactgtatgcgcccaccaagatgtatggaggcgcccgcaagcgctctacccagcatcctgtgcgcgttcgcggtcatttccgcgctccctggggcgcactcaagggtcgtacccgcactcggaccacggtcgatgatgtgatcgaccaggtggtcgccgatgctcgtaattatactcctactgcgcctacatctactgtggatgcagttattgacagtgtggtggcagacgcccgcgcctatgctcgccggaagagccgaaggaggcgcatcgccaggcgccacagggctactcccgccatgcgagccgcaaaagctattctgcggagggccaaacgtgtggggcgaagagccatgcttagagcggccagacgcgcggcttcaggtgccagcagcggcaggtcccgcaggcgcgcggccacggcggcagcagcggccattgccaacatggcccaaccgcgaagaggcaatgtgtactgggtgcgtgatgccactaccggccagcgcgtgcccgtgcgcacccgcccccctcgcacttagaagatactgagcagtctccgatgttgtgtcccagcggcaagtatgtccaagcgcaaatacaaggaagagatgctccaggtcatcgcgcctgaaatctacggtccgccggtgaaggatgaaaaaaagccccgcaaaatcaagcgggtcaaaaataacaaaaaggaagaagatgacgatgatgggctggtggagtttgtgcgcgagttcgccccaagacggcgcgtgcagtggcgcgggcgcaaagtgcgtcaagtgctcagacccgggaccactgtggtttttacacctggcgagcgttccagcactacttttaaacggtcctatgatgaggtgtacggggatgacgatattcttgagcaggcggcagaccgccttgacgagtttgcttatggcaagcgcactagatccagtcccaaagaggaggctgtgtccattcctttggatcatggaaatcccacccccagcctcaaaccagtcaccctgcagcaagtgctgcccgtgcctgcgcggagaggcgtaaagcgcgagggtgaggacctatatcccaccatgcagctaatggtgcccaagcgccagaggctagaagacgtactggagaaaatgaaagtggatgccgatatccagcctgaggtcaaagtaagacctatcaaggaagtggcgccaggtttgggagtacaaaccttcgacatcaagattcccaccgagtccatggaagtgcagaccgaacctgcaaaacccaccacctcaattgaggtgcaaacggaaccctggatgcccgcgcccgttgccgcccccagcaccactcgaagatcacgacgaaagtacggcccagcaagtctgctaatgcccaactatgctctgcacccatccatcattcccactccgggttacagaggcactcgctactatcgaaaccggagcaacacctctcgccgccgcaaaccacctgcaagtcgcactcgccgtcgccgccgccgcaacactgccagcaaattgactcccgccgccctggtgcggagagtgtaccgcgatggtcgcgctgaacctctgacgctgccgcgcgcgcgctaccatccaagcatcaccacttaatgactgttgacgctgcctccttgcagatatggccctcacttgccgccttcgcgtccccattactggctaccgaggaagaaactcgcgccgtagaaggatgttggggcgagggatgcgccgccacagacgaaggcgcgctatcagcagacgattagggggtggctttttgccagctcttatacccatcatcgccgcagcgatcggggcgataccaggcatagcttcagtggcggttcaggcctcgcagcgccactaacattggaaaaaacttataaataaaaaatagaatggactctgacgctcctggtcctgtgactatgtttttgtagagatggaagacatcaatttttcatccctggctccgcgacacggcacgaggccgtacatgggcacctggagcgacatcggcacgagccaactgaacgggggcgccttcaattggagcagtatctggagcgggcttaaaaattttggctcgaccgtaaaaacctatgggaacaaagcttggaacagcagcacagggcaggctctgagaaataagcttaaggaacaaaacttccaacagaaggtggtcgatgggatcgcctctggtattaacggcgtagtggatctggccaaccaggctgtacaaaaacagataaacagccgcctggacccgccgcccgcaacccctggtgaaatggaagtggaggaagaacttcctccgctggaaaagcggggcgacaagcgtccgcgacccgagctagagcagacgctggtgacgcgcgcagacgagcccccttcatatgaggaggcagtaaagctcggaatgcccactaccaggcctgtagctcacatggctaccggggtgatgaaaccttctcagtcacatcgacccgccaccttggacttgcctcctccccctgcttctgcggcgcctgttcccaaacctgtcgctaccagaaagcccaccgccgtacagcccgtcgccgtagccagaccgcgtcctgggggcacaccgcgcccgaaagcaaactggcaaagtactctgaacagcatcgtgggtctgggcgtgcagagtgtaaagcgccgtcgctgctattaattaaatatggagtagcgcttaacttgcttgtctgtgtgtatgtatcatcaccacgccgccgcagcagaggagaaaggaagaggtcgcgcgccgaggctgagttgctttcaagatggccaccccatcgatgatgccccaatgggcatacatgcacatcgccggacaggatgcttcggagtacctcagtccgggtctggtgcagttcgcccgtgcaacagacacctacttcagtatggggaacaaatttagaaaccccacagtggcgcccacccacgatgtgaccaccgaccgtagccagcgcctgatgctgcgcttcgtgcccgttgaccgggaagacaatacctactcttacaaagttcgctacacgctggctgtaggcgacaacagagtgcttgacatggccagcacattctttgacattcggggggtgcttgatagaggtcctagcttcaagccatattccggcacagcttacaattcactcgctcctaagggcgcgcccaatacatctcagtggatagttacaacaaatggggacaatgcagtaactaccaccacaaacacatttggcattgcttccatgaagggagacaatattactaaagaaggtttgcaaattgggaaagacattaccactactgaaggagaagaaaagcccatttatgccgataaaacatatcagccagagcctcaagttggagaagaatcatggactgatactgatggaacaaatgaaaagtttggtggaagagcccttaaaccagctaccaacatgaagccatgctacgggtcttttgcaagacctacaaacataaaagggggccaagctaaaaacagaaaagtaaaaccaacaaccgaaggaggggttgaaactgaggaaccagatattgatatggaatttttcgatggtagagatgctgttgcaggagctttagcgcctgaaattgtgctttatacggaaaatgtaaatttggaaactccagacagtcatgtggtatataaaccagaaacgtctaataactctcatgcaaatttgggtcaacaagccatgcctaacagacccaattacattggcttcagggataacttcgtaggcctaatgtactacaacagtactggaaatatgggagttttggctggccaagcatcacaactgaatgcagtggttgacttgcaggacagaaatactgaactgtcatatcagcttttgcttgattctctgggagacagaaccagatacttcagcatgtggaatcaggctgtggacagttacgatcccgatgttcgcattattgaaaatcatggcatcgaggatgaactgcctaattactgttttcctctgaatggcataggaccagggcacacatatcaaggcattaaagttaaaaccgatgacactaatggatgggaaaaagatgctaatgttgctccagctaatgaaataaccataggcaacaacctggctatggaaattaatatccaagctaacctttggagaagttttctgtactctaatgtggctttgtaccttccagatgtttacaagtacacgccacctaacattactttgcccactaacaccaacacctatgagtacatgaacgggcgagtggtatccccatccctggttgattcatacatcaacattggcgccaggtggtctcttgacccaatggacaatgtgaatccattcaaccaccaccgcaatgctggtctgcgctacaggtccatgcttctgggaaatggtcgttatgtgcctttccacatacaagtgcctcagaaattctttgctgtcaagaacctacttcttctacctggctcctacacctacgagtggaacttccgaaaggatgtgaacatggtcctgcaaagttcccttggaaatgacctcagaacggatggtgctaccataagtttcaccagcatcaatctctatgccaccttcttccccatggctcacaacacagcttccacccttgaagccatgctgcgcaacgataccaatgatcagtcatttaacgactacctctctgcagctaacatgctttaccccattcctgccaatgcaaccaacattccaatttccatcccatctcgcaactgggcagccttcaggggctggtccttcaccagactcaaaaccaaggagactccatctcttggatcagggttcgatccctacttcgtatattctggatctattccctacctggatggcaccttttaccttaaccacactttcaagaaggtctccatcatgtttgactcctcagtcagctggcctggcaatgacaggctgttgagtccaaatgagtttgaaatcaagcgcactgtggacggggaaggatacaacgtggcacaatgcaacatgaccaaagactggttcctggttcagatgcttgccaattacaacattggctaccagggcttttacatccctgagggatacaaggatcgcatgtactcctttttcagaaacttccagcctatgagcaggcaggtggttgatgaggttaattacactgactacaaagccgtcaccttaccataccaacacaacaactctggctttgtagggtaccttgcacctactatgagacaaggggaaccttacccagccaattatccatacccgctcatcggaactactgccgttaagagtgtcacccagaaaaagttcctgtgcgacaggaccatgtggcgcattcccttctccagcaacttcatgtccatgggggcccttaccgacctgggacagaacatgctctatgccaactcagcccatgcgctggacatgacttttgaggtggatcccatggatgagcccaccctgctttatcttcttttcgaagtcttcgacgtggtcagagtgcaccagccacaccgcggcgtcatcgaggccgtctacctgcgcacaccgttctcggccggcaacgccaccacataagaagcctcttgcttcttgcaagcagcagctgcagccatgacatgcgggtccggaaacggctccagcgagcaagagctcaaagccatcgtccgagacctgggctgcggaccctatttcctgggaacctttgacaagcgtttcccggggttcatggcccccgacaagctcgcctgcgccatagtcaacactgccggacgcgagacggggggagagcactggctggcttttggttggaacccgcgctacaacacctgctacctttttgatccttttgggttctcggatgagcggctcaaacagatttaccagtttgagtacgaggggctcctgcgtcgcagtgcccttgctaccaaagaccgctgcatcaccctggagaagtctacccaaagcgtgcagggtccgcgctcagccgcctgtggacttttttgctgtatgttccttcatgcctttgtgcactggcccgaccgccccatggacggaaaccccaccatgaagttgctgactggggtgtccaacagcatgctccaatcaccccaagtccagcccaccctgcgccgcaaccaggaggtgctataccgcttcctaaacacccactcatcttactttcgttctcaccgcgcgcgcattgaaagggccaccgcgtttgaccgtatggatatgcaataagtcatgtaaaaccgtgttcaataaacagcactttatttttacatgcactgaggctctggttttgctcatttgtttcatcatttactcagaagtcgaatgggttctggcgggagtcagagtgacccgcgggcagggatacgttgcggaactgtaacctgttctgccacttgaactcggggattaccagcttgggaactggaatctcgggaaaggtgtcttgccacaactttctggtcagttgcatagcgccaagcaggtcaggagcagagatcttgaaatcacagttggggccggcattctggacacgggagttgcgatacactgggttgcaacactggaacactatcaacgctgggtgtcttacgcttgccaacacggttgggtcactgatggtagtcacatccaagtcttcagcattggccatcccaaagggggtcatcttacatgtctgcctgcccatcacgggagcgcagcctggcttgtggttgcaatcacaatgaatggggatcagcatcatcctggcttggtcgggagttatccctgggtacacagccttcatgaaggcttcgtactgcttaaaagcttcctgggccttacttccctcggtgtagaacatcccacaggacttgctggaaaattgattagtagtacagttggcatcattcacacaacagcgggcatcgttgttggccaactgaaccacatttctgccccagcggttttgggtgatcttggctctgtctggattctccttcatagcgcgctgcccgttctcgctcgccacatccatctcgataatgtggtccttctggatcatgatagtgccatgcaggcatttcaccttgccttcataatcggtgcatccatgagcccacagagcgcacccggtgcactcccaattattgtgggcgatctcagaataataatgtaccaatccctgcatgaatcttcccatcattgttgtcaaggtcttcatgctggtaaatgtcagcgggatgccacggtgctcctcgttcacatactggtggcagatacgcttgtattgctcgtgctgctctggcatcagcttgaaagaggttctcagatcattatccagcctgtacctttccattagcacagccatcacttccatgcccttctcccaggcagataccaggggcagactcaaaggattcctaacagcaataaaagtagctcctttagctatagggtcattcttgtcgatcttctcaacacttctcttgccatccttctcaatgatgcgcaccggggggtagctgaagcccacggccaccaactgagcctgttctctttcttcttcactatcctggctgatgtcttgcagagggacatgcttggtcttcctgggcttcttcttgggagggatcgggggaggactgttgctccgctccggagacagggatgactgcgaagtttcgcttaccaataccacctggctctcggtagaagaaccggaccccacacgacggtaggtgttcctcttcgggggcagaggtggaggcgactgagatgggctgcggtctggccttggaggcggatggctggcagagctcattccgcgttcgggggtgtgctcccggtggcggtcgcttgactgatttcctccgcggctggccattgtgttctcctaggcagagaaacaacagacatggaaactcagccatcactgccaacatcgctgcaagcaccatcacacctcgcccccagcagcgacgaggaggagagcttaaccaccccaccacccagtcccgctaccaccacctctaccctcgatgatgaggaggaggtcgacgcagcccaggagatgcaggcgcaggataatgtgaaaacggaagagattgaggcagatgtcgagcaggacccgggctatgtgacgccggcggagcaccaggaggagctgaaacgctttctagacagagaggatgacgaccgcccagagcatcaagcagatggcgtttaccaggaggctgggatcagggatcatgtcgccgactacctcaccggccttggtggggaggacgtgctcctcaaacatctagcaaggcagtcgatcatagttaaagacgcattgctcgatctcactgaagtgcccatcagtgtggaagagcttagccgcgcctacgagctgaacctcttttcgcctcaggtaccccccaagcggcagccaaacggcacctgcgaggccaaccctcgactcaacttctatccagcttttactatccccgaagtgttggccacctaccacatctttttcaagaaccaaaagattccagtctcctgccgcgccaaccgcacccgcgccgatgccctgctcaacttgggtccgggagctcgcttacctgatatagcttccttggaagaggttccaaagatctttgagggtctgggaagtgatgagacacgggccgcaaatgctctgcaacagggagagaatgacatggatgaacaccacagcgctctggtggaactggagggtgacaatgcccggattgcagtgctcaagcgcagtatcgtggtcacccattttgcctaccccgctgttaacctgccccccaaagttatgagcgctgtcatggaccatctgctcatcaaacgagcaagacctctttcagaaaaccagaacatgcaggatccagacgcctcggacgagggcaagccggtagtcagtgacgagcagctatctcgctggctgggtaccaactccccccgagatttggaagagaggcgcaagcttatgatggctgtagtgctagtaactgtggagctggagtgtctgcgccgctttttcaccgaccctgagaccctgcgcaagctagaggagaacctgcactacacctttagacatggcttcgtgcggcaggcatgcaagatctccaacgtggagcttaccaacctggtttcttacatgggcattttgcatgagaaccgactagggcagagcgtcctgcacaccacccttaaaggggaggcccgccgtgactacatccgagactgtgtctacctctacctctgccatacctggcaaactggtatgggtgtgtggcaacagtgtttggaagagcagaacctaaaagagctggacaagctcttgcagagatccctcaaagccctgtggacaggttttgatgagcgcaccgtcgcctcggacctggcagacatcatcttccccgagcgtctcagggttactctgcgaaacggcctgccagactttatgagccagagcatgcttaacaactttcgctctttcatcctggaacgctccggtatcctgcctgccacctgctgtgcgctgccctccgactttgtgcctctcacctaccgcgagtgcccaccgccgctatggagccactgctacctgttccgcctggccaactacctctcctaccactcggatgttatagaggatgtgagcggagacggcctgctggaatgccactgccgctgcaatctttgcacaccccaccgctcccttgcctgcaacccccagttgctgagcgagacccagattatcggcaccttcgagctgcagggtcccagaagtaaaggcgaggggtcttctccggggcagagtttgaaactgacaccggggctgtggacctccgcctacctgcgcaagtttcaccccgaggactaccatccctatgagatcaggttctatgaggaccaatcacatcctcccaaagtcgagctctcagcctgcgtcatcacccagggagcaattctggcccaattgcaagccatccaaaaatctcgccaagaatttctgctaaaaaagggaaacggggtctaccttgaccctcagaccggtgaggagctcaacacaaggttcccccaggatgtcccatcgccgaggaagcaagaagttgaaggtgcagctgtcgcccccagaggatatgaaggaagactgggacagtcaggcagaggaggagatggaagattgggacagccaggcagaggaggtggacagcctggaggaagacagtttggaggaggaagacgaggaggcagaggaggtggaagaagcaaccgccgccaaacagttgtcatcggcggcggagacaagcaagtccccagacagcagcacggctaccatctccgctccgggtcggggggcccagcggcggcccaacagtagatgggacgagaccgggcgattcccaaacccgaccaccgcttccaagaccggtaagaaggagcgacagggatacaagtcctggcgtggacataaaaacgctatcatctcctgcttgcatgaatgcgggggcaacatatccttcacccggcgatacctgctcttccaccacggtgtaaacttcccccgcaatatcttgcattactaccgtcacctccacagcccctactgcagtcagcaagtcccggcaaccccgacagaaaaatacagcagcgacaacggtgaccagaaaaccagcagttagaaaatccacaacaagtgcaccaggaggaggactgaggatcacagcgaacgagccagcgcagaccagagagctgaggaaccggatctttccaaccctctatgccattttccagcagagtcgggggcaagagcaggaactgaaagtaaaaaaccgatctctgcgctcgctcaccagaagttgtttgtatcacaagagcgaagaccaacttcagcgcactctcgaggacgccgaggctctcttcaacaagtactgcgcgctgactcttaaagagtagcccttgcccgcgctcattttgaaaacggcgggaatcacgtcacccttggcacctgtcctttgcccttgtcatgagtaaagagattcccacgccttacatgtggagctatcagccccaaatggggttggcagcaggcgcttcccaggactactccacccgcatgaattggcttagcgccgggccctcaatgatatcacgggttaatgatatacgagcttatcgaaaccagttactcctagaacagtcagctctcaccaccacaccccgtcaacaccttaatccccgaaattggcccgccaccctggtgtaccaggaaaatcccgctcccaccaccgtactacttcctcgagacgcccaggccgaagttcagatgactaacgcaggtgtacagctggcgggcggttccgccctatgtcgtcaccgacctcaacagagtataaaacgcctggtgattagaggccgaggtatccagctcaacgacgagtcggttagctcttcgcttggtctgcgaccagacggagtcttccaaatcgccggctgtgggagatcttccttcactcctcgtcaggctgtgctgactttggagagttcgtcctcgcagccccgctcgggcggcattggaactctccagtttgtggaggagtttactccctctgtctacttcaaccccttctccggctctcctggccagtacccggacgagttcataccaaacttcgacgcaatcagcgagtcagtggatggctatgattgatgtctaatggtggtgcggctgagctagctcgactgcgacacctagaccactgccgccgctttcgctgcttcgcccgggaactcaccgagttcatctacttcgaactctccgaggagcaccctcagggtccggcccacggagtgcggattaccatcgaagggggaatagactctcgcctgcatcgcatcttctcccagcggcccgtgctaattgaacgcgaccagggaaatacaaccatctccatctactgcatctgtaaccaccccggattgcatgaaagcctttgctgtcttgtttgtgctgagtttaataaaaactgagttaagaccctcctacggactaccgcttcttcaatcaggactttacaacaccaaccagatcttccagaagacccagacccttcctcctttcatccaggactctaactctaccttaccagcaccctccactactaaccttcccgaaacaaacaagcttgcatctcatctgcaacaccgcctttcacgaagccttctttctgccaatactaccactcccaaaaccggaggtgagctccgcggtcttcctactgacgacccctgggtggtagcgggttttgtaacgttaggagtagttgcgggtgggcttgtgctgatcctttgctacctatacacaccttgctgtgcatatttagtcatattgtgctgttggtttaagaaatgggggccatactagtcgtgcttgctttactttcgcttttgggtctgggctctgctaatctcaatcctctcgatcacgatccatgtttagacttcgacccagaaaactgcacacttacttttgcacccgacacaagccgtctctgtggagttcttattaagtgcggatgggactgcaggtccgttgaaattacacataataacaaaacatggaacaataccttatccaccacatgggagccaggagttccccagtggtatactgtctctgtccgaggtcctgacggttccatccgcattagtaacaacactttcattttttctgaaatgtgcgatctggccatgttcatgagcagacagtatgacctatggcctcccagcaaagagaacattgtggcattttccattgcttattgcttggtaacatgcatcatcactgctatcatttgtgtgtgcatacacttgcttatagttattcgccctagacaaagcaatgaggaaaaagagaaaatgccttaacctttttcctcataccttttctttacagcatggcttctgttacagctctaattattgccagcattgtcactgtcgctcacgggcaaacaattgtccatattaccttaggacataatcacactcttgtagggcccccaattacttcagaggttatttggaccaaacttggaagtgttgattattttgatataatttgcaacaaaactaaaccaatatttgtaatctgtaacagacaaaatctcacgttaattaatgttagcaaaatttataacggttactattatggttatgacagatccagtagtcaatataaaaattacttagttcgcataactcagcccaaattaacagtgccaactatgacaataattaaaatggctaataaagcattagaaaattttacatcaccaacaacacccaatgaaaaaaacattccaaattcaatgattgcaattattgcggcggtggcattgggaatggcactaataataatatgcatgctcctatatgcttgttactataaaaagtttcaacataaacaggatccactactaaattttaacatttaattttttatacagatgatttccactacaatttttatcattactagccttgcagctgtaacttatggccgttcacacctaactgtacctgttggctcaacatgtacactacaaggaccccaagaaggctatgtcacttggtggagaatatatgataatggagggttcgctagaccatgtgatcagcctggtacaaaattttcatgcaacggaagagacttgaccattattaacataacatcaaatgagcaaggcttctattatggaaccaactataaaaatagtttagattacaacattattgtagtgccagccaccacttctgctccccgcaaatccactttctctagcagcagtgccaaagcaagcacaattcctaaaacagcttctgctatgttaaagcttccaaaaatcgctttaagtaattccacagccgctcccaatacaattcctaaatcaacaattggcatcattactgccgtggtagtgggattaatgattatatttttgtgtataatgtactacgcctgctgctatagaaaacatgaacaaaaaggtgatgcattactaaattttgatatttaattttttatagaattatgatattgtttcaatcaaataccactacctcctatgcatacacaaacattcagcctaaatacgctatgcaactagaaatcacaatactaattgtaattggaattcttatactatctgttattctttattttatattctgccgtcaaatacccaatgttcatagaaattctaaaagacgtcccatctattctcctatgattagtcgtccccatatggctctgaatgaaatctaagatctttttttttttctcttacagtatggtgaacatcaatcatgatccctagaaatttcttcttcaccatactcatctgtgcttttaatgtctgtgctactttcacagcagtagccactgcaagcccagactgtataggaccatttgcttcctatgcactttttgccttcgttacttgcatctgcgtgtgtagcatagtctgcctggttattaattttttccaactggtagactggatctttgtgcgaattgcctacctacgtcaccatcccgaataccgcaatcaaaatgttgcggcacttcttaggcttatttaaaaccatgcaggctatgctaccagtcattttaattttgctactaccctgcattcccctagcttccaccgccactcgcgctacacctgaacaacttagaaaatgcaaatttcaacaaccatggtcatttcttgattgctaccatgaaaaatctgattttcccacatactggatagtgattgttggaataattaacatactttcatgtacctttttctcaatcacaatataccccacatttaattttgggtggaattctcccaatgcactgggttacccacaagaaccagatgaacatattccactacaacacatacaacaaccactagcactggtacagtatgaaaatgagccacaaccttcactgccccctgccattagttacttcaacctaaccggcggagatgactgacccaatcgccacatcatccaccgctgccaaggagctgctggacatggacggacgtgcctcagaacagcgactcatccaactacgcattcgtcagcagcaggaacgagcagtaaaagagctaagggatgccattgggattcaccagtgcaaaaaaggcatattctgcttagtaaaacaatccaaaatctcctacgagatcaccgctactgaccatcgtctctcatacgagctcggtccgcagcgacaaaaattcacctgcatggtgggaatcaaccccatagttatcacccagcagtctggagatactaagggttgtatccagtgttcctgtgattccaccgagtgcatctacacactgctgaagaccctctgcggccttcgagacctcctacccatgaactaatcattgcccctaccttacccaatcaaaatattaataaagacacttacttgaaatcagcaatacagtctttgtcaaaactttctaccagcagcacctcaccctcttcccaactctggtactctaaacgtcggagggtggcatactttctccacactttgaaagggatgtcaaattttatttcctcttctttgcccacaatcttcatttctttatccccagatggccaagcgagctcggctaagcacttccttcaacccggtgtacccttatgaagatgaaagcagctcacaacacccatttataaatcctggtttcatttcccctgacgggttcacacaaagtccaaacggggttttaagtcttaaatgtgttaatccacttaccactgcaagcggctccctccaacttaaagtgggaagtggtcttacagtagacactactgatggatccttagaagaaaacatcaaagttaacacccccctaacaaagtcaaaccattctataaatttaccaataggaaacggtttgcaaatagaacaaaacaaactttgcagtaaactcggaaatggtcttacatttgactcttccaattctattgcactgaaaaataacactttatggacaggtccaaaaccagaagccaactgcataattgaatacgggaaacaaaacccagatagcaaactaactttaatccttgtaaaaaatggaggaattgttaatggatatgtaacgctaatgggagcctcagactacgttaacaccttatttaaaaacaaaaatgtctccattaatgtagaactatactttgatgccactggtcatatattaccagactcatcttctcttaaaacagatctagaactaaaatacaagcaaaccgctgactttagtgcaagaggttttatgccaagtactacagcgtatccatttgtccttcctaatgcgggaacacataatgaaaattatatttttggtcaatgctactacaaagcaagcgatggtgccctttttccgttggaagttactgttatgcttaataaacgcctgccagatagtcgcacatcctatgttatgacttttttatggtccttgaatgctggtctagctccagaaactactcaggcaaccctcataacctccccatttaccttttcctatattagagaagatgactgacaacaaaaataaagttcaacattttttattgaaattccttttacagtattcgagtagttattttgcctcccccttcccatttaacagaatacaccaatctctccccacgcacagctttaaacatttggataccattagagatagacatagttttagattccacattccaaacagtttcagagcgagccaatctggggtcagtaatacataaaaatgcatcgggatagtcttttaaagcgctttcacagtccaactgttgcggatgcgactccggagtctgaatcacggtcatctggaagaagaacgatgggaatcataatccgaaaacggaatcgggcgattgtgtctcatcaaacccacaagcaaccgctgtctgcgtcgctccgtgcgactgctgtttatgggatcggggtccgcagtgtcctgaagcatgattttaatagcccttaacattaactttctggtgcgatgcgcgcagcaacgcattctgatttcacttagattactacagtaggtacagcacattatcacaatattgtttaataaaccataattaaaagcgctccagccaaaactcatatctgatataatcgcccctgcatgaccatcataccaaagtttaatataaattaaatgtcgttccctcaaaaacacactacccacatacatgatctcttttggcatgtgcatattaacaatttgtctgtaccatggacaacgttggttaatcatgcaacccaatataaccttccggaaccacactgccaacaccgctcccccagccatgcattgaagtgaaccctgctgattacaatgacaatgaagaacccaattctctcgaccatgaatcacttgagactgaaaaatatctatagtagcacaacaaagacataaatgcatgcatcttctcataatttttaactcctctggatttaaaaacatatcccaaggaatgggaaactcttgcagaacagtaaagctggcagaacaaggaagaccacgaacacaacttacactatgcatagtcatagtatcacaatctggcaacagcgggtggtcttcagtcatagaagctcgggtttcattttcctcacatcgtggtaattgggctctggtgtaagggtgatgtctggcgcatgatgtggagcgtgcgcgcaaccttgtcataatggagttgcttcctgacattctcgtattttgtatagcaaaacgctgccctggcacaacacactcttcttcgtcttctatcctgccgcttagtgtgttccgtctgataattcaagtacagccacactcttaagttggtcaaaagaatgctggcttcagttgtaatcaaaactccatcatatttaattgttctaaggaaatcatccacggtagcatatgcaaatcccaaccaagcaatgcaactggattgcgtttcaagcagcagaggagagggaagagacggaagaatcatgttaatttttattccaaacgatctcgcagtacttcaaattgtagatcgcgcagatggcatctatcgcccccactgtgttggtgaaaaagcacagctaaatcaaaagaaatgcgattttcaaggtgctcaacggtggcttccaacaaagcctccacgcgcacatccaaaaacaaaagaataccaaaagaaggagcattttctaactcctcaaacatcatattacattcctgcaccattcccagataattttcagctttccagccttgaattattcgtgtcagttcttgtggtaaatccaaaccacacattacaaacaggtcccggagggcgccctccaccaccattcttaaacacaccctcataatgacaaaatatcttgctcctgtgtcacctgtagcaaattaagaatggcatcatcaattgacatgcccttggctctaagttcttctctaagttctagttgtagatactctctcatattatcaccaaactgcttagccagaagccccccgggaacaatagcaggggacgctacagtgcagtacaagcgcagacctccccaattggctccagcaaaaacaagattagaataagcatactgggaaccaccagtaatatcatcaaagttgctggaaatataatcaggcagagtttcttgtaaaaattgaataaaagaaaaattttccaaagaaacattcaaaaccgttgggatgcaaatacaataggttaccgcgctgcgctccaacattgttagttttgaattagtctgcaaaataaaagaaacaagcgtcatatcatagtagcctgtcgaacaggtggaaaaatcagtctttccatcacaagacaagccacagggtctccagctcgaccctcgtaaaacctgtcattgtgattaaacaacagcaccgaaagttcctcgcggtggccagcatgaataattcttgatgaagcatacaatccagacatgttagcatcagttaaagagaaaaaacagccaacatagcctctgggtataattatgcttaattttaagtatagcaaagccacccctcgcggatacaaagtaaaaggcacaggagaataaaaaatataattatttctctgctgctgttcaggcaacgttgctcccggtccctctaaatagacatacaaagcctcatcagccatggcttaccaggcaaagtacagcgggcgcacaaagcacaagctctaaagaagctctaaaaacactctccaacctctccacaatatatacacaagccctaaactgacgtaatgggagtaaagtgaaaaaaaaataccgccaagcccaacacacaccccgaaactgcgtcagcaggaaaaagtacagtttcacttccgcattcccaacaagcgtaacttcctctttctcatggtacgtcacatccgattaacttgcaacgtcattttcccacggtcgcgccgccccttttagccgttaaccccgcagccaatcaccacacagcgcgcacttttttaaattacctcatttacatgttggcaccattccatctataaggtatattatatagatag

SEQ ID NO: 140 - DNA, 35083 bp, Human adenovirus type 9
ctatctatataatataccccacaaagtaaacaaaagttaatatgcaaatgagcttttgaattttaacggtttcggggcggagccaacgctgattggacgagagaagacgatgcaaatgacgtcacgacgcacggctaacggtcgccgcggaggcgtggcctagcccggaagcaagtcgcggggctgatgacgtataaaaaagcggactttagacccggaaacggccgattttcccgcggccacgcccggatatgaggtaattctgggcggatgcaagtgaaattaggtcattttggcgcgaaaactgaatgaggaagtgaaaagcgaaaaataccggtccctcccagggcggaatatttaccgagggccgagagactttgaccgattacgtgggggtttcgattgcggtgtttttttcgcgaatttccgcgtccgtgtcaaagtccggtgtttatgtcacagatcagctgatccgcagggtatttaaaccagtcgagtccgtcaagaggccactcttgagtgccagcgagtagagatttctctgagctccgctcccagagaccgagaaaaatgagacacctgcgcctcctgccttcaactgtgcccggtgagctggctgtgcttatgctggaggactttgtggatacagtattggaggacgaactgcatccaagtccgttcgagctgggacccacacttcaggatctctatgatctggaggtagatgcccatgatgacgaccctaacgaggaggctgtgaatttaatatttccagaatctatgattcttcaggctgacatagccaacgaatctactccacttcatacaccgactctgtcacccatacctgaattggaagaggaggacgaactagacctccggtgttatgaggaaggttttcctcccagcgattcagaggatgaacggggtgagcagaccatggctctgatctcagactatgcttgtgtgattgtggaggagcaagatgtgattgaaaaatctactgagccagtacaaggctgtaggaactgccagtaccaccgggataagtccggagatgtgaacgcctcctgcgctttgtgctatatgaaacagactttcagctttatttacagtaagtggagtgaatgtgagagaggctgagtgcttaacacataactgtaatgcttgaacagctgtgctaagtgtggtttattttgttactaggtccggtgtcagaggatgagttatcaccctcagaagaagaccacccgtctccccctgagctgtcaggcgaaacgcccctgcaagtgttcagacccaccccagtcagacccagtggcgagaggcgagcggctgttgacaaaattgaggacttgttgcaggacatgggtggggatgaacctttggacctgagcttgaaacgccccaggaactagacgcagctgcgcttagtcatgtgtaaataaagttgtacaataaaagtctatgtgacgcatgcaaggtgtggtttatgactcatgggcggggcttagtcctatataagtggcaacacctgggcacttgggcacagaccttcagggagttcctgatggatgtgtggactatccttgcagactttagcaagacacgccggcttgtagaggatagttcagacgggtgctccgggttctggagacactggtttggaactcctctatctcgcctggtgtacacagttaagaaggattataaagaggaatttgaaaatatttttgctgactgctctggcctgctagattctctgaatcttggccaccagtcccttttccaggaaagggtactccacagccttgatttttccagcccagggcgcactacagccggggttgcttttgtggtttttctggttgacaaatggagccaggacacccaactgagcaggggctacatcctggacttcgcagccatgcacctgtggagggcctggatcaggcagcggggacagagaatcttgaattactggcttctacagccagcagctccgggtcttcttcgtctacacagacaaacatccatgttggaggaagaaatgaggcaggccatggacgagaacccgaggagcggcctggaccctccgtcggaagaggagctggattgaatcaggtatccagcctgtacccagagcttagcaaggtgctgacatccatggccaggggagttaagagggagaggagcgatgggggtaataccgggatgatgaccgagctgacggccagcctgatgaatcggaagcgcccagagcgccttacctggtacgagctacagcaggagtgcagggatgagttgggcctgatgcaggataaatatggcctggagcagataaaaacccattggttgaacccagatgaggattgggaggaggctattaagaagtatgccaagatagccctgcgcccagattgcaagtacatagtgaccaagaccgtgaatatcagacatgcctgctacatctcggggaacggggcagaggtggtcatcgataccctggacaaggccgccttcaggtgttgcatgatgggaatgagagcaggagtgatgaatatgaattccatgatcttcatgaacatgaagttcaatggagagaagtttaatggggtgctgttcatggccaacagccacatgaccctgcatggctgcagtttcttcggcttcaacaatatgtgcgcagaggtctggggcgcttccaagatcaggggatgtaagttttatggctgctggatgggcgtggtcggaagacccaagagcgagatgtctgtgaagcagtgtgtgtttgagaaatgctacctgggagtctctaccgagggcaatgctagagtgagacactgctcttccctggagacgggctgcttctgcctggtgaagggcacagcctctctgaagcataatatggtgaagggctgcacggatgagcgcatgtacaacatgctgacctgcgattcgggggtctgccatatcctgaagaacatccatgtgacctcccaccccagaaagaagtggccagtgtttgagaataacctgctgatcaagtgccatatgcacctgggagccagaaggggcaccttccagccgtaccagtgcaactttagccagaccaagctgctgttggagaacgatgccttctccagggtgaacctgaacggcatctttgacatggatgtctcggtgtacaagatcctgagatacgatgagaccaagtccagggtgcgcgcttgcgagtgcgggggcagacacaccaggatgcagccagtggccctggatgtgaccgaggagctgagaccagaccacctggtgatggcctgtaccgggaccgagttcagctccagtggggaggacacagattagaggtaggtcgagtgagtagtgggcgtggctaaggtgactataaaggcgggtgtcttacgagggtctttttgcttttctgcagacatcatgaacgggaccggcggggccttcgaaggggggctttttagcccttatttgacaacccgcctgccgggatgggccggagttcgtcagaatgtgatgggatcgacggtggatgggcgcccagtgcttccagcaaattcctcgaccatgacctacgcgaccgtggggagctcgtcgctcgacagcaccgccgcagccgcggcagccgcagctgccatgacagcgacgagactggcctcgagctacatgcccagcagcggcagcagcccctctgtgcccagttccatcatcgccgaggagaaactgctggccctgctggccgagctggaagccctgagccgccagctggccgccctgacccagcaggtgtccgagctccgcgagcagcaacagcagcaaaataaatgattcaataaacacagattctgattcaaacagcaaagcatctttattatttattttttcgcgcgcggtaggccctggtccacctctcccgatcattgagagtgcggtggattttttccaggacccggtagaggtgggattggatgttgaggtacatgggcatgagcccgtcccgggggtggaggtagcaccactgcatggcctcgtgctctggggtcgtgttgtagatgatccagtcatagcaggggcgctgggcgtggtgctggatgatgtctttgagaaggagactgatggccacggggagccccttggtgtaggtattggcgaagcggttgagctgggagggatgcatgcggggggagatgatgtgcagtttggcctggatcttgaggttggcgatgttgccacccagatcccgccgggggttcatgttgtgcaggaccaccaggacggtgtagcccgtgcacttggggaacttgtcatgcaacttggaagggaatgcgtggaagaatttggagacgcccttgtgcccgcccaggttttccatgcattcatccatgatgatggcgatgggcccgtgggctgcggctttggcaaagacgtttctggggtcagatacatcataattatgctcctgggtgagatcatcataagacattttaatgaatttggggcggagggtgccagattgggggacgatggttccctcgggccccggggcgaagttcccctcacagatctgcatctcccaggctttcatctcggagggggggatcatgtccacctgcggggcgatgaaaaaaacggtttccggggctggggtgatgagctgcgaagagagcaggtttctcaacagctgggacttgccgcacccggtcgggccgtagatgaccccgatgacgggttgcaggtggtagttcaaggacatgcagctgccgtcgtcccggaggaggggggccacctcgttgagcatgtctctgacttggaggttttcccgaacgagctcgccgaggaggcggtccccgcccagcgagaggagctcttgcagggaagcaaagtttttcaggggcttgagtccgtcggccatgggcatcttggcgagggtctgcgagaggagctccaggcggtcccagagctcggtgacgtgctctacggcatctcgatccagcagacttcctcgtttcgggggttgggacgactgcgactgtagggcacgagacgatgggcgtccagcgcggccagcgtcatgtccttccagggtctcagggtccgagtgagggtggtctccgtcacggtgaaggggtgggcccctggctgggcgcttgcaagggtgcgcttgagactcatcctgctggtgctgaaacgggcacggtcttcgccctgcgagtcggcgagatagcagttgaccatgagctcgtagttgagggcctcggcggcgtggcccttggcgcggagcttgcccttggaagagcgcccgcaggcgggacagaggagggattgcagggcgtagagcttgggggcgagaaagacggactcgggagcgaaagcgtccgctccgcagtgggcgcagacggtctcgcactcgacgagccaggtgagctctggctgctcggggtcaaaaaccagttttcccccgttctttttgatgcgcttcttacctcgcgtctccatgagtctgtgtccgcgctcggtgacaaacaggctgtcggtgtccccgtagacggacttgattggcctgtcctgcaggggcgtcccgcggtcctcctcgtagagaaactcggaccactctgagacaaaggcgcgcgtccacgccaagacaaaggaggccacgtgcgaggggtagcggtcgttgtccactagggggtccaccttttccaccgtgtgcagacacatgtccccctcctccgcatccaagaaggtgattggcttgtaggtgtaggccacgtgaccgggggtccccgacgggggggtataaaagggggcgggtctgtgctcgtcctcactctcttccgcgtcgctgtccacgagcgccagctgttggggtaggtattccctctcgagagcgggcatgacctcggcactcaggttgtcagtttctagaaacgaggaggatttgatgttggcttgccctgccgcgatgctttttaggagactttcatccatctggtcagaaaagactatttttttattgtcaagcttggtggcgaaggagccatagagggcgttggatagaagcttggcgatggatctcatggtctgatttttgtcacggtcggcgcgctccttggccgcgatgtttagctggacatactcgcgcgcgacgcacttccattcggggaagacggtggtgcgctcgtcgggcacgatcctgacgcgccagccgcggttatgcagggtgaccaggtccacgctggtggccacctcgccgcgcaggggctcgttggtccagcagagtctgccgcccttgcgcgagcagaacgggggcagcacatcaagcagatgctcgtcaggggggtccgcatcgatggtgaagatgcccggacagagttccttgtcaaaataatcgatttttgaggatgcatcatccaaggccatctgccactcgcgggcggccagcgctcgctcgtaggggttgaggggcggaccccagggcatgggatgagtgagggcggaggcgtacatgccgcagatgtcgtagacatagatgggctccgagaggatgccgatgtaggtgggataacagcgccccccgcggatgctggcgcgcacgtagtcatacaactcgtgcgagggggccaagaaggcggggccgagattggtgcgctggggctgctcggcgcggaagacgatctggcgaaagatggcgtgcgagttggaggagatggtgggccgttggaagatgttaaagtgggcgtggggcaagcggaccgagtcgcggatgaagtgcgcgtaggagtcttgcagcttggcgacgagctcggcggtgacgaggacgtccatggcgcagtagtccagcgtttcgcggatgatgtcataacccgcctctcctttcttctcccacagctcgcggttgagggcgtactcctcgtcatccttccagtactcccggagcgggaatcctcgatcgtccgcacggtaagagcccagcatgtagaaatggttcacggccttgtagggacagcagcccttctccacggggagggcgtaagcttgagcggccttgcggagcgaggtgtgcgtcagggcgaaggtgtccctgaccatgactttcaagaactggtacttgaaatccgagtcgtcgcagccgccgtgctcccagagctcgaaatcggtgcgcttcttcgagagggggttaggcagagcgaaagtgacgtcattgaagagaatcttgcctgctcgcggcatgaaattgcgggtgatgcggaaagggcccgggacggaggctcggttgttgatcacctgggcggcaaggacgatctcgtcgaagccgttgatgttgtgcccgacgatgtagagttccatgaatcgcgggcggcctttgatgtgcggcagctttttgagctcctcgtaggtgaggtcctcggggcattgcaggccgtgctgctctagcgcccactcctggagatgtgggttggcttgcatgaaggaagcccagagctcgcgggccatgagggtctggagctcgtcgcgaaagaggcggaactgctggcccacggccatcttttctggggtgacgcagtagaaggtgagggggtcccgctcccagcgatcccagcgtaagcgcacggcgagatcgcgagcgagggcgaccagctcgggttcccccgagaatttcatgaccagcatgaaggggacgagctgcttgccgaaggaccccatccaggtgtaggtttctacatcgtaggtgacaaagagccgctccgtgcgaggatgagagccgattgggaagaactggatttcctgccaccagttggacgagtggctgttgatgtgatgaaagtagaaatcccgccggcgaaccgagcactcgtgctgatgcttgtaaaagcgtccgcagtactcgcagcgctgcacgggctgtacctcatccacgagatacacagcgcgtcccttgaggaggaacttcaggagtggcggccctggctggtggctttcatgttcgcctgcgtgggactcaccctggggctcctcgaggacggagaggctgacgagcccgcgcgggagccaggtccagatctcggcgcggcgggggcggagagcgaagacgagggcgcgcagttgggagctgtccatggtgtcgcggagatccaggtccgggggcagggttctgaggttgacctcgtagaggcgggtgagggcgtgcttgagatgcagatggtacttgatctccacgggtgagttggtggtcgtgtccacgcattgcatgagcccgtagctgcgcggggccacgaccgtgccgcggtgcgcttttagaagcggtgtcgcgggcgtgctcccggcggcagcggcggttctggccccgcgggcaggggcggcagaggcacgtcggcgtggcgctcgggcaggtcccggtgctgcgccctgagagcgctggcgtgcgcgacgacgcggcggttgacatcctggatctgccgcctctgcgtgaagaccacgggccccgtgactttgaacctgaaagacagttcaacagaatcaatctctgcgtcattgacggcggcctgacgcaggatctcttgcacgtcgcccgagttgtcctggtaggcgatctcggtcatgaactgttcgatctcctcctcctggagatcgccgcggcccgcgcgctccacggtggcggcgaggtcattggagatgcggcccatgagctgcgagaaggcgcccaggccgctctcgttccagacgcggctgtagaccacgtccccgtcggcgtcgcgtgcgcgcatgaccacctgcgcgaggttgagctccacgtgccgcgtgaagacggcgtagttgcgcaggcgctggaagaggtagttgagggtggtggcgatgtgctcggtgacgaagaagtacatgatccagcggcgcaggggcatctcgctgatgtcgccgatggcctccagcctttccatggcctcgtagaaatccacggcgaagttgaaaaactgggcattgcgggccgagaccgtgagctcgtcttccaggagccggatgagctcggcgatggtggcgcgcacctcgcgctcgaaatccccgggggcctcctcttcttcctcttcttccatgacgacctcttcttctatttcttcctctgggggcggtggtggtggcggggcccgacgacgacggcgacgcaccgggagacggtcgacgaagcgctcgatcatctccccgcggcggcgacgcatggtttcggtgacggcgcgaccccgttcgcgaggacgcagcgtgaagacgccgccggtcatctcccggtaatggggcgggtccccgttgggcagcgatagggcgctgacgatgcatcttatcaattgcggtgtaggggacgtgagcgcgtcgagatcgaccggatcggagaatctttcgaggaaagcgtctagccaatcgcagtcgcaaggtaagctcaaacacgtagcagccctgtggacgctgttagaattgcggttgctgatgatgtaattgaagtaggcgtttttgaggcggcggatggtggcgaggaggaccaggtccttgggtcccgcttgctggatgcggagccgctcggccatgccccaggcctggccctgacaccggctcaggttcttgtagtagtcatgcatgagcctctcgatgtcatcactggcggaggcggagtcttccatgcgggtgaccccgacgcccctgagcggctgcacgagcgccaggtcggcgacgacgcgctcggcgaggatggcctgttgcacgcgggtgagggtgtcctggaagtcgtccatgtcgacaaagcggtggtaggccccggtgttgatggtgtaggtgcagttggccatgagcgaccagttgacggtctgcaggccgggttgcacgacctcggagtacctgagccgcgagaaggcgcgcgagtcgaagacgtagtcattgcaggtgcgcacgaggtactggtagccgactaggaagtgcggcggcggctggcggtagagcggccagcgctgggtggccggcgcgcccggggccaggtcctcgagcatgaggcggtggtagccgtagaggtagcgggacatccaggtgatgccggcggcggtggtggaggcgcgcgggaactcgcggacgcggttccagatgttgcgcagcggcaggaaatagtccatggtcggcacggtctggccggtgagacgcgcgcagtcattgacgctctagaggcaaaaacgaaagcggttgagcgggctcttcctccgtagcctggcggaacgcaaacgggttaggccgcgtgtgtaccccggttcgagtccccttgaatcaggctggagccgcgactaacgtggtattggcactcccgtctcgacccgagcccgatagccgccaggatacggcggagagtcctttttgccggccaaggggggtcgctagacttgaaagcgaccgaaaaccctgccgggtagtggctcgcgcccgtagtctggagaagcatcgccagggttgagtcgcggcagaacccggttcgcggacggccgcggcgagcgggacttggtcaccccgccgatttaaagacccacagccagccgacttctccagttacgggagcgagcccccttttttctttttgccagatgcatcccgtcctgcgccaaatgcgtcccacccccccggcgaccaccgcgaccgcggccgtagcaggcgccggcgctagccagccacagccacagacagagatggacttggaagagggcgaagggctggcgagactgggggcgccgtccccggagcgacacccccgcgtgcagctgcagaaggacgtgcgcccggcgtacgtgcctgcgcagaacctgttcagggaccgcagcggggaggagcccgaggagatgcgcgactgccggtttcgggcgggcagggagctgcgcgagggcctggaccgccagcgcgtgctgcgcgacgaggatttcgagccgaacgagcagacggggatcagccccgcgcgcgctcacgtggcggcggccaacctggtgacggcctacgagcagacggtgaagcaggagcgcaacttccaaaagagtttcaacaaccacgtgcgcaccctgatcgcgcgcgaggaggtggccctgggcctgatgcacctgtgggacctggcggaggccatcgtgcagaacccggacagcaagcctctgacggcgcagctgttcctggtggtgcagcacagcagggacaacgaggcgttcagggaggcactgctgaacatcgccgagcccgagggtcgctggctgctggagctgatcaacatcttgcagagcatcgtagtgcaggagcgcagcctgagcttggccgagaaggtggcggcgatcaactactcggtgctgagcctgggcaagttttacgcgcgcaagatttacaagacgccgtacgtgcccatagacaaggaggtgaagatagacagcttttacatgcgcatggcgctcaaggtgctgacgctgagcgacgacctgggcgtgtaccgcaacgaccgcatccacaaggccgtgagcacgagccggcggcgcgagctaagcgaccgcgagctgatgctgagcctgcgccgggcgctggtagggggcgctgccggcggcgaggagtcctacttcgacatgggggcggacctgcattggcagccgagccggcgcgccttggaggccgcctacggtccagaggacttggatgaggaagaggaagaggaggaggatgcacccgctgcggggtactgacgcctccgtgatgtgtttttagatgcagcaagccccggaccccgccataagggcggcgctgcaaagccagccgtccggtctagcatcggacgactgggaggccgcgatgcaacgcatcatggccctgacgacccgcaaccccgagtcctttagacaacagccgcaggccaacagactctcggccattctggaggcggtggtcccctctcggaccaaccccacgcacgagaaggtgctggcgatcgtgaacgcgctggcggagaacaaggccatccgtcccgacgaggccgggctggtgtacaacgccctgctggagcgcgtgggccgctacaacagcacgaacgtgcagtccaacctggaccggctggtgacggacgtgcgcgaggccgtggcgcagcgcgagcggttcaagaacgagggcctgggctcgctggtggcgctgaacgccttcctggcgacgcagccggcgaacgtgccgcgcgggcaggacgattacaccaactttatcagcgcgctgcggctgatggtgaccgaggttccccagagcgaggtgtaccagtcgggcccggactactttttccagacgagccggcagggcttgcagacggtgaacctgagccaggctttcaagaacctgcgagggctgtggggcgtgcaggcgcccgtgggcgaccggtcgacggtgagcagcttgctgacgcccaactcgcggctgctgctgctgctgatcgcgcccttcaccgacagcggcagcgtgaaccgcaactcgtacctgggccatctgctgacgctgtaccgcgaggccataggccaggcgcaggtggacgagcagaccttccaggagatcactagcgtgagccgcgcgctggggcagaacgacaccgacagtctgagggccaccctgaacttcttgctgaccaatagacagcagaagatcccggcgcaatatgcgctgtcggccgaggaggaaaggatcctgagatatgtgcagcagagcgtagggctgttcctgatgcaggagggggccacccccagcgccgcgctggacatgaccgcgcgcaacatggaacctagcatgtacgccgccaaccggccgttcatcaataagctgatggactacctgcaccgcgcggcggtcatgaacacggactactttacaaacgccatcctgaacccgcactggctcccgccgccggggttctacacgggcgagtacgacatgcccgaccccaacgacgggttcctgtgggacgacgtggacagcgtggtgttctcgccgacctttcaaaagcgccaggaggcgccgccgagcgagggcgcggtggggaggagcccctttcctagcttagggagtttgcatagcttgccgggctcggtgaacagcggcagggtgagccggccgcgcttgctgggcgaggacgagtacctgaacgactcgctgctgcagccgccgcgggccaagaacgccatggccaataacgggatagagagtctggtggacaaactgaaccgttggaagacctacgctcaggaccatagggatgcgcccgcgccgcggcgacagcgccacgaccggcagcggggcctggtgtgggacgacgaggactcggccgacgatagcagcgtgttggacttgggcgggagcggtggggtcaacccgttcgcgcatctgcagcccaaactggggcgacggatgttttgaaatgcaaaataaaactcaccaaggccatagcgtgcgttctcttccttgttagagatgaggcgtgcggtggtgtcttcctctcctcctccctcgtacgagagcgtgatggcgcaggcgaccctggaggttccgtttgtgcctccgcggtatatggctcctacggagggcagaaacagcattcgttactcggagctggctccgcagtacgacaccactcgcgtgtacttggtggacaacaagtcggcggacatcgcttccctgaactaccaaaacgaccacagcaacttcctgaccacggtggtgcagaacaacgatttcacccccgccgaggccagcacgcagacgataaattttgacgagcggtcgcggtggggcggtgatctgaagaccattctgcacactaacatgcccaatgtgaacgagtacatgttcaccagcaagtttaaggcgcgggtgatggtggctaggaagcatccagagggggtagttgaaacagatttgagtcaggataagcttgaatatgagtggtttgagtttaccctgcccgagggaaacttttccgagaccatgaccatagacctgatgaacaacgccatcttggaaaactacttgcaagtggggcggcaaaatggcgtgctggagagcgatatcggagtcaagtttgacagcagaaatttcaagctgggctgggacccggtgaccaagctggtgatgccaggggtctacacctacgaggccttccacccggacgtggtgctgctgccgggctgcggggtggacttcaccgagagccgcctgagcaacctcctgggcattcgcaagaagcaacctttccaagagggcttcagaatcatgtatgaggatctagaaggtggcaacatccccgccctccttgatgtgcccaagtacttggaaagcaagaagaaagttgaagacgaaactaaaaatgcagctgcggctacagccgatacaaccactaggggtgatacatttgcaactccagcgcaagagacagcagctgataagaaggtagaagtcttgcccattgaaaaggatgagagtggtagaagttacaacctgatccaggggacccacgacacgctgtaccgcagttggtacctgtcctatacctacggggaccccgagaagggggtgcagtcgtggacgctgctcaccaccccggacgtcacctgcggcgcggagcaagtctactggtcgctgccggacctcatgcaagacccagtcaccttccgctctacccagcaagtcagcaactaccccgtggtcggcgccgagctcatgcccttccgcgccaagagcttttacaacgacctcgccgtctactcccagctcatccgcagctacacctccctcacccacgtcttcaaccgcttccccgacaaccagatcctctgccgcccgcccgcgcccaccatcaccaccgtcagtgaaaacgtgcctgctctcacagatcacgggacgctaccgctgcgcagcagtatccgcggagtccagcgagtgaccgtcactgacgcccgtcgccgcacctgtccctacgtctacaaggccctgggcatagtcgcgccgcgcgtgctttccagtcgcaccttctaaaaaaatgtctattctcatctcgcccagcaataacaccggctggggtcttactagacccagcaccatgtacggaggagccaagaagcgctcccagcagcaccccgtccgcgtccgcggccacttccgcgctccctggggcgcttacaagcgcgggcggacttccaccgccgtgcgcaccaccgtcgacgacgtcatcgactcggtggtcgccgacgcgcgcaactatacccccgccccctccaccgtggacgcggtcatcgacagcgtggtggccgacgcgcgcgactatgccagacgcaagagccggcggcgacggatcgccaggcgccaccggagcacgcccgccatgcgcgccgcccgggctctgctgcgccgcgccagacgcacgggccgccgggccatgatgcgagccgcgcgccgcgctgccactgcacccacccccgcaggcaggactcgcagacgagcggccgccgccgccgccgcggccatctctagcatgaccagacccaggcgcggaaacgtgtactgggtgcgcgactccgtcacgggcgtgcgcgtgcccgtgcgcacccgtcctcctcgtccctgatctaatgcttgtgtcctcccccgcaagcgacgatgtcaaagcgcaaaatcaaggaggagatgctccaggtcgtcgccccggagatttacggaccaccccaggcggaccagaaaccccgcaaaatcaagcgggttaaaaaaaaggatgaggtggacgagggggcagtagagtttgtgcgcgagttcgctccgcggcggcgcgtaaattggaaggggcgcagggtgcagcgcgtgttgcggcccggcacggcggtggtgttcacgcccggcgagcggtcctcagtcaggagcaagcgtagctatgacgaggtgtacggcgacgacgacatcctggaccaggcggcggagcgggcgggcgagttcgcctacgggaagcggtcgcgcgaagaggagctgatctcgctgccgctggacgaaagcaaccccacgccgagcctgaagcccgtgaccctgcagcaggtgctgccccaggcggtgctgctgccgagccgcggggtcaagcgcgagggcgagagcatgtacccgaccatgcagatcatggtgcccaagcgccggcgcgtggaggacgtgctggacaccgtgaaaatggatgtggagcccgaggtcaaggtgcgccccatcaagcaggtggcgccgggcctgggcgtgcagaccgtggacattcagatccccaccgacatggatgtcgacaaaaaaccctcgaccagcatcgaggtgcagaccgacccctggctcccagcctccactgctaccgtctccacttctaccgccgccacggctaccgagcctcccaggaggcgaagatggggcgccgccagccggctgatgcccaactacgtggtgcatccttccatcatcccgacgccgggctaccgcggcacccggtactacgccagccgccggcgcccagccagcaaacgccgccgccgcaccgccacccgccgccgtctggcccccgcccgcgtgcgccgcgtgaccacgcgccggggccgctcgctcgttctgcccaccgtgcgctaccaccccagcatcctttaattcgtgtgctgtgatactgttgcagagagatggctctcacttgccgcctgcgcatccccgtcccgaattaccgaggaagatcccgccgcaggagaggcatggcaggcagcggcctgaaccgccgccggcggcgggccatgcgcaggcgcctgagtggcggctttctgcccgcgctcatccccataatcgccgcggccatcggcacgatcccgggcatagcttccgttgcgctgcaggcgtcgcagcgccgttgatgtgcgaataaaagcctctttagactctgacacacctggtcctgtatatttttagaatggaagacatcaattttgcgtccctggctccgcggcacggcacgcggccgttcatgggcacctggaacgagatcggcaccagccagctgaacgggggcgccttcaattggagcagtgtctggagcgggcttaaaaatttcggctcgacgctccggacctatgggaacaaggcctggaatagtagcacggggcagttgctaagggaaaagctcaaagaccagaactttcagcagaaggtggtggacgggctggcctcgggcattaacggggtggtggacatcgcgaaccaggccgtgcagcgcgagataaacagccgcctggacccgcggccgcccacggtggtggagatggaagatgcaactcttccgccgcccaaaggcgagaagcggccgcggcccgacgcggaggagacgatcctgcaggtggacgagccgccctcgtacgaggaggccgtcaaggccggcatgcccaccacgcgcatcatcgcgccgctggccacgggtgtaatgaaacccgccacccttgacctgcctccaccacccgcgcccgctccaccgaaggcagctcccgcggtcgtgcaggcccccccggtggcgaccgccgtgcgccgcgtccccgcccgccgccaggcccagaactggcagagcacgttgcacagtatcgtaggcctgggagtgaaaagtctgaagcgccgccgatgctattgaaagagaggaaagaggacactaaagggagagcttaacttgtatgtgccttaccgccagagaacgcgcgaagatggccaccccctcgatgatgccgcagtgggcgtacatgcacatcgccgggcaggacgcctcggagtacctgagcccgggtctggtgcagtttgcccgcgccaccgacacgtacttcagcctgggcaacaagtttaggaaccccacggtggccccgacccacgatgtgaccacggaccggtcccagcgtctgacgctgcgcttcgtgcccgtggatcgcgaggacaccacgtactcgtacaaggcgcgcttcactctggccgtgggcgacaaccgggtgctagacatggccagcacttactttgacatccgcggcgtcctggaccgcggtcccagcttcaaaccctactcgggcacagcttacaacagtctggcccccaagggtgcccccaactccagccagtggcttgcaaaagacaccaatgctggcgatcaagcattaaaaacccacacacatggcgtagctgctatggggggaacagatatcacagcaaagggtttgcaaattggtgttgacacgactgaaaacaagaatgagcctatttatgcaaatgaaatataccagccagaacctcaggtaggagaggaaaacttgcaagatgttgaaaacttttatggaggcagagctcttaaaaaagaaaccaaaatgaaaccttgctatggctcgtttgccagacccacaaatgaaaaaggcggtcaagccaaatttttaactgacggcgatggtcagctaactaaaaatcatgatatcacaatgaatttctttgacactcctggaggaacagttggtcaggatactgaacttgaagcagacattgttatgtatgctgagaatgtgcatctggaaactccagacacgcatgtggtgtacaaaccaggaacttctgatgagagttcagaagcaaatttggttcagcagtccatgccaaacaggcccaactacatcggcttcagggacaactttgtgggtctcatgtactataacagcactggcaacatgggtgtgctggctggtcaagcatctcagttgaatgctgtggtcgacttgcaagacagaaacacagagctgtcttaccagctcttgctagattctctgggtgacagaaccagatactttagcatgtggaactctgcagtggacagttatgatcctgatgtcaggattattgaaaatcacggtgtggaagatgaacttccaaactattgcttcccattggatggagctggcactaatgctacctaccaaggtgtaaaagttaaaaatggccaagatggagatgtaaacgcagattgggaaaaagatccaaatcttgcttcacgaaaccaaatatgcaagggtaacatcttcgccatggagatcaacctccaggccaacctgtggaagagttttctgtactcgaatgtggccctgtacctgcccgactcatacaagtacacgccggccaacgtcacgctgcccgccaataccaacacctacgagtacatgaacggccgcgtggtagccccctcgctggtggacgcctacatcaacatcggcgcccggtggtcgctggaccccatggacaacgtcaacccattcaaccaccaccgcaacgcgggcctgcgttaccgctccatgcttctgggcaacggccgctacgtgcccttccacatccaagtgccccaaaagttctttgccatcaagaacctgctcctgctccccggctcctacacctacgagtggaacttccgcaaggatgtcaacatgatcctgcagagttccctcggaaacgacctgcgcgtcgacggcgcctccgtccgcttcgacagcgtcaacctctacgccacattcttccccatggcgcacaacaccgcctccaccctggaagccatgctgcgcaacgacaccaacgaccagtccttcaacgactacctctcggccgccaacatgctctaccccatcccggccaaggccaccaacgtgcccatctccatcccctcgcgcaactgggccgccttccgcggctggagtttcacccggctcaagaccaaagaaactccctccctcggctcgggtttcgatccctactttgtatactcgggttccatcccctacctcgacgggaccttctacctcaaccacaccttcaagaaggtctccatcatgttcgactcctcggtcagctggcccggcaacgaccggctgctcacgccgaacgagttcgagatcaagcgcagtgtcgacggggagggctacaatgtggcccaatgcaacatgaccaaggactggttcctcgtccagatgctctcccactacaacatcggctaccagggcttccacgtgcccgagggctacaaggaccgcatgtactccttcttccgcaacttccagcccatgagcaggcaggtggtcgatgagatcaactacaaggactacaaggccgtcaccctgcccttccagcacaacaactcgggcttcaccggctaccttgcacccaccatgcgtcaggggcagccctaccccgccaacttcccctatcctctcatcggccagacagccgtgccctctgtcacccagaaaaagttcctctgcgacagggtcatgtggcgcatccccttctccagcaacttcatgtccatgggcgccctcaccgacctgggtcagaacatgctctatgccaactcggcccacgcgctcgacatgaccttcgaggtggaccccatggatgagcccaccctcctctatcttctcttcgaagttttcgacgtggtcagagtgcaccagccgcaccgcggcgtcatcgaggccgtctacctgcgcacgcccttctccgccggcaacgccaccacctaagcatgagcggctccagcgaacgagagctcgcggccatcgtgcgcgacctgggctgcgggccctactttttgggcacccacgacaagcgcttcccgggcttcctcgccggcgacaagctggcctgcgccattgtcaacacggccggccgcgagaccggaggcgtgcactggctcgccttcggctggaacccgcgctcgcgcacctgctacatgttcgacccatttgggttctcggaccgccggctcaagcagatttacagcttcgagtacgaggctatgttgcgccgaagcgccctggcttcctcgcccgaccgctgtctcagcctcgagcagtccacccagaccgtgcaggggcccgactccgccgcctgcggacttttctgttgcatgttcttgcatgccttcgtgcactggcccgaccgacccatggacgggaaccccaccatgaacttgctgacgggggtgcccaacggcatgctacaatcgccacaggtgctgcccaccctccggcgcaaccaggaggagctctaccgcttcctcgcgcgccactccccttactttcgctcccaccgcgccgccatcgaacacgccaccgcttttgacaaaatgaaacaactgcgtgtatctcaataaacagcacttttattttacatgtactggagtatatgcaagttatttaaaagtcgaaggggttctcgcgctcgtcgttgtgcgccgcgctggggagggccacgttgcggtactggaacttgggctgccacttgaactcggggatcaccagtttgggcactggggtctcggggaaggtctcgctccacatgcgccggctcatctgcagggcgcccagtatgtccggggcggagatcttgaaatcgcagttggggccggtgctctgcgcgcgcgagttgcggtacacggggttgcagcactggaacaccatcagactggggtacttcacactggccagcacgctcttgtcgctgatctgatccttgtccaggtcctcggcgttgctcaggccgaacggggtcatcttgcacagctggcggcccaggaagggcacgctctgaggcttgtggttacactcgcagtgcacgggcatcagcatcatccccgcgccgcgctgcatattcgggtagagggccttgacaaaggccgagatctgcttgaaagcttgctgggccttggccccctcgctgaaaaacaggccgcagctcttcccgctgaactggttattcccgcacccggcatcatgcacgcagcagcgcgcgtcatggctggtcagttgcaccacgctccgtccccagcggttctgggtcaccttggccttgctaggctgctccttcaacgcgcgctggccgttctcgctggtcacatccatctccaccacgtggtccttgtggatcatcaccgtcccgtgcaaacacttgagctggccttccacctcggtgcagccgtgatcccacagggcgcagccggtgcactcccaattcttgtgtgcgatcccgctgtggctgaagatgtaaccttgcaacaggcgacccatgacggtgctaaatgatttactggtgctgaaggtcagttgcagaccgcgggcctcctcgttcatccaggtctggcacatcttttggaagatctcggtctgctcgggcatgagcttgtaagcatcgcgcaggccgctgtcgacgcggtagcgttccataagcacgttcatggtatccatgcccttctcccaggacgagaccagaggcagactcagggggttgcgcacgttcagaataccgggggtcgcgggctcgacgatgcgttttccgtccttgccttccttcaacagaaccggcggctggctgaatcccactcccacgatcacggcatcttcctggggcatctcttcgtcggggtctaccttggtcacatgcttggtctttctggcttgcttcttttttggagggctgtccacggggaccacgtcctcctcggaagacccggagcccacccgctgatactttcggcgcttggtgggcagaggaggtggaggcgaggggctcctctcctgctccggcggatagcgcgccgacccgtggccccggggcggagtggcctctcgctccatgaaccggcgcacgtcctgactgccgccggccattgtttcctaggggaagatggaggagcagccgcgtaagcaggagcaggaggaggacttaaccacccacgagcaacccaaaatcgagcaggacctgggcttcgaagagccggctcgtctagaacccccacaggatgaacaggagcacgagcaagacgcaggccaggaggagaccgacgctgggctcgagcatggctacctgggaggagaggaggatgtgctgctgaaacacttgcagcgccagtccctcatcctccgggacgccctggccgaccggagcgaaacccccctcagcgtcgaggagctgtgtcgggcctacgagctcaacctcttctcgccgcgcgtgccccccaaacgccagcccaacggcacctgcgagcccaacccgcgtctcaacttctatcccgttttcgcggtccccgaggcccttgccacctatcacatttttttcaagaaccaaaagatccccgtctcctgccgcgccaaccgcacccgcgccgacgcgctcctcgctctggggcccggcgcgcgcatacctgatatcgcttccctggaagaggtgcccaagatcttcgaagggctcggtcgggacgagacgcgcgcggcgaacgctctgaaagaaacagcagaggaagagggtcacactagcgccctggtagagttggaaggcgacaacgccaggctggccgtgctcaagcgcagcgtcgagctcacccactttgcctaccccgccgtcaacctcccgcccaaggtcatgcgtcacatcatggatcagctcatcatgccccacatcgaagccctcgatgaaagtcaggagcagcgccccgaggacgcccgacccgtggtcagcgacgagatgctcgcgcgctggctcgggacccgcgagccccaggctttggaacagcggcgcaagctcatgctggccgtggtcctggtcaccctcgagctcgaatgcatgcgccgcttcttcagcgaccccgagaccctgcgcaaagtcgaggagaccctgcactacactttcagacacggtttcgtcaggcaggcctgcaagatttccaacgtggagctgaccaacctggtctcctgcctggggatcctgcatgagaaccgcctgggacagaccgtactccactctaccctgaagggcgaggcgcggagggactatgtccgcgactgcgtctttctctttctctgccacacatggcaagcagccatgggcgtgtggcagcagtgtctcgaggacgagaacctgaaggagctggacaagcttcttgctagaaaccttaaaaagctttggacgggcttcgacgagcgcaccgtcgcctcggacctggccgagatcgtcttccccgagcgcctgaggcagacgctgaaaggcgggctgcccgacttcatgagccagagcatgttgcaaaactaccgcactttcattctcgagcgatcggggatgctgcccgccacctgcaacgctttcccctccgactttgtcccgctgagctaccgcgagtgtcccccgccgctgtggagccactgctacctcttgcagctggccaactacatcgcctaccactcggacgtgatcgaggacgtgagcggcgaggggctgctcgagtgccactgccgctgcaacctgtgctccccgcaccgctccctggtctgcaacccccagctccttagcgagacccaggtcatcggtaccttcgagctgcaaggtccgcaggagtccaccgctccgctgaaactcacgccggggttgtggacttccgcgtacctgcgcaaatttgtacccgaggactaccacgcccatgagataaagttcttcgaggaccaatcgcggccgcagcacgcggatctcacggcctgcgtcatcacccagggcgcgatcctcgcccaattgcacgccatccaaaaatcccgccaagagtttcttctgaaaaagggtagaggggtctacctggacccccagacgggcgaggtgctcaacacgggtctcccccagcatgccgaggaagaagcaggagccgctagtggaggagatggaagaagaatgggacagccaggcagaggaggacgaatgggaggaggagacagaggaggaagaattggaagaggtggaagaggagcaggcaacagagcagcccgtcgccgcaccatccgcgccggcagccccggcggtcacggatacaacctccgcagctccggccaagcctcctcgtagatgggatcgagtgaagggcgacggtaagcacgagcggcagggctaccgatcatggagggcccacaaagccgcgatcatcgcctgcttgcaagactgcggggggaacatcgctttcgcccgccgctacctgctcttccaccgcggggtgaacatcccccgcaacgtgttgcattactaccgtcaccttcacagctaagaaaaagcaagtaagagaagtcgccggaggaggcctgaggatcgcggcgaacgagcccttgaccaccagggagctgaggaaccggatcttccccactctttatgccatttttcagcagagtcgaggtcagcagcaagagctcaaagtaaaaaaccggtctctgcgctcgctcacccgcagttgcttgtaccacaaaaacgaagatcagctgcagcgcactctcgaagacgccgaggctctgttccacaagtactgcgcgctcactcttaaagactaaggcgcgcccacccggaaaaaaggcgggaattacctcatcgccaccatgagcaaggagattcccaccccttacatgtggagctatcagccccagatgggcctggccgcgggcgcctcccaagactactccacacgcatgaactggctcagtgccggcccctcgatgatatcacgggtcaacggggtccgcagtcatcgaaaccagatattgttggagcaggcggcggtcacctccacgcccagggcaaagctcaacccgcgtaattggccctccaccctggtgtatcaggaaatccccgggccgactaccgtactacttccgcgtgacgcactggccgaagtccgcatgactaactcaggtgtccagctggccggcggcgcttcccggtgcccgctccgcccacaatcgggtataaaaaccctggtgatccgaggcagaggcacacagctcaacgacgagttggtgagctcttcgatcggtctgcgaccggacggagtgttccaactagccggagccgggagatcgtccttcactcccaaccaggcctacctgaccttgcagagcagctcttcggagcctcgctcgggaggcatcggaaccctccagttcgtggaggagtttgtgccctcggtctacttcaaccccttctcgggatcgccaggcctctacccggacgagttcataccgaacttcgacgcagtgagagaagcggtggacggctacgactgaatgtcccatggtgactctgctgagctcgctcggttgaggcatctggaccactgccgccgcctgcgctgcttcgcccgggagagctgcggactcatctactttgagtttcccgaggagcaccccaacggtcctgcacacggagtgcggatcaccgtagagggcaccaccgagtctcacctggtcaggttcttcacccagcaacccttcctggtcgagcgggaccggggcgccaccacctacaccgtctactgcatctgtccgaccccgaagttgcatgagaatttttgctgtactctttgtggtgagtttaataaaagctaaactcttgcaatactctggaccttgtcgtcatcaactcaacgagaccgtctacctcaccaaccagactgaggtaaaactcacctgcagaccacacaagacctatatcatctggttcttcgagaacacctcatttgcagtctcaaacactcactgcaacgacggtgttgaacttccaaacaacctttccagtggactgagttacgatacacatagagctaagctcgtcctctacaatcctttcgtagagggaacctaccactgccagagcggaccttgcttccacagttttactttggtgaacgttaccggcagcagcacagccgctccagaacctaaccttccttctgatactatcaaacctcgtttcggaggtgagctaaggcttcccccttctgaggagggggttagcccatacgaagtggtcgggtatttgattttaggggtggtcctgggtgggtgcatagcggtgctagctcagctgccttgctgggtagaaatcaaaatctttatatgctgggtcagacattgtggggaggaactatgaaggggctcttgctgattatcctttccctggtggggggtgtgctgtcatgccacgaacagccacgatgtaacatcaccacaggcaatgagaggagtgtcatatgcacagtagtcatcaaatgcgagcatgaatgccctctcaacatcacattcaaaaaccgtaccatggggaatgcatgggtgggcgactgggaaccaggagatgagcagaactacacggtcactgtccatggtagcgatggaaatcacactttcggtttcaaattcatttttgaagtcatgtgtgatatcacactgcatgtggctagacttcatggcttgtggccccctaccaaggaaaacatggttgggttttctttggcttttgtgatcatggcctgctttatgtcaggtctgctggtaggagctctagtgtggttcctgaaacgcaagcccaggtatggaaatgaggagaaggaaaaattgctataaattctttttcttttcacagcaccatgaatactttgaccagtgtcgtgctgctctctcttcttgtagcttttagtcaggcaggaattattaacttaaatgtatcatggggaatgaatctaactttagtgggaccctcagacctgccagttacatggtatgatggaaagggaatgcagttttgtgatggaaatacaattaagaacccacaaatcaagcatagctgtaatcaacagaatctaactttacttaatgctgacaagtctcatgaaagaacttacctaggttacagacatgacagtaagggaaaagtagactataaggttacagtcataccacctcctccagccactcgcaagcctttgtcagagcctcattatgttactgtgactatgggcgataacataactttagtgggaccctcagacctgccagttacatggtatgatggagaaggaaataaattctgcgatggagaaaaagttgaacatgcagaatttaatcatacatgtaacatccagaacctgacactgctctttgtcaacttaacgcataatggagcatacattggttataacaaagacggttctgatagagaattatatgaggtgtcagtcaaaaccttgtttcagaacggggctggacaaagtaaggttgaacaaggtaataaagggaaacctaatactgctcaaagtggtggtaaaaaaaccaaaacagaacatagaaaccagagtccaaaaagaaaatcaacaaataaccttcagccaacacaattgtatgttaggccttttactaatgttagtttaactggacctccaaatggcaaggttacttggtatgatggcgaacttaatgatccatgtgaacaaaagtacaaactcagaactttttgcaatcagcaaaatctaactttaattaatgtaagcagcacttatgatggcatctattatggcactgatgaaaaagataaggcaaatcgttacagaataaaagtaaatactacaaatcacaaaactgttaaaattaagccacataccagagaacctcctgctgtacaagaaaaacagtttgaattacaagatgcagaaactgatgaaaacgaatcaaaaattccctcagctactgtggcaatcgtggtgggagtgattgcgggctttgtaactctgatcattgtcttcatatgctacatctgctgccgcaagcgtcccaggtcatacaatcatatggtagacccactactcagcttctcttactgaaactcagtcactctcatttcagaaccatgaaggctttcacagcttgcgttctgattagcatagtcacacttagttcagctgcaatgattaatgttaatgtcactagaggtggtaaaattacattgaatgggacttatccacaaactacatggacaagatatcataaagatggatggaaaaatatctgtgaatggaatgttactgcatataaatgcttcaataatggaagcattactattactgccactgccaacattacttctggcacatacaaagctgaaagctataaaaatgaaatcaaaaaactaacctataaaaacaacaaaaccacatttgaagattctggaaattatgaacatcaaaaattatctttttatatgttgacaataattgaactgcctacaactaaggctcccaccacaaccagtacaactattaagaccactactcacactacagtgcaaaatactactttattgattgggtttttactgagagagaatgaaagtactactgaacagacagaggctacctcaagtgccttcagcagcactgcaaatttaacttcgcttgcttggactaatgaaaccggagtatcattgatgcatggccagccttactcaggtttggatattcaaattacttttctggttgtctgtgggatctttattcttgtggttcttctgtactttgtctgctgcaaagccagagagaaatctaggaggcccatctacaggccagtgattggggaacctcagccactccaagtggatggaggcttaaggaatcttctcttctcttttacagtatggtgatcagccatgattcctaggttcttcctatttaacatcctcttttgtctcttcaacatctgtgctgccttcgcggccgtctcgcacgcctcgcccgactgtctagggcctttccccacctacctcctctttgccctgctcacctgcacctgcgtctgcagcattgtctgcgtggtcatcaccttcctgcagctcatcgactggtgctgcgcgcgctataattatctccaccacagtcccgaatacagggacgagaacgtagccagaatcttaaggctcatctgaccatgcagactctgctcatgctgctatccctcctatcccctgccctcgccacttctgctgactctaaatgcaaattcgcggagatatggaatttcttagattgctatcaggagaaaattgatatgccctcctattacttggtgattgtgggaatagtcatggtctgctcctgcactttctttgccatcatgatctacccctgttttgatctcggctggaactctgttgaggcattcacatacacactagaaagcagttcactagcctccacgccaccgcccacaccgcctccccgcagaaatcagttcccactgattcagtacttagaagagccccctccccggcccccttccactgttagctactttcacataaccggcggcgatgactgaccaccacctggacctcgagatggacggccaggcctccgagcagcgcatcctgcaactgcgcgtccgtcagcagcaggagcgggccgccaaggagctcctcgatgccatcaacatccaccagtgcaagaagggcatcttctgccttgtcaaacaggcaaagatcacctacgagctcgtgtccggcggcaagcagcatcgcctcacctatgagctgccccagcagaagcagaagttcacctgcatggtgggcgtcaaccccatagtcatcacccagcagtcgggcgagaccaacggctgcatccactgctcctgcgaaagccccgagtgcatatactccctcctcaagaccctttgcggactccgcgacctcctccccatgaactgatgttgattaaaagcacgaaaaccaatcagacccttcccccatttccccattcccaattactcataaaataaatcattggaattaatcattcaataaaaatcacttacttgaaatctgaaagtatgtctctggtgtagttgttcagcagcacctcgttaccctcctcccagctctggtattccagtccccggcgggcggcgaacttcctccacaccttgaaagggatgtcaaattcctggtccacaattttcattgtcttccctctcagatgtcaaagaggctccgggtggaagatgacttcaaccccgtctacccctatggctacgcgcggaatcagaatatccccttcctcactcccccctttgtctcctccgatggattccaaaacttcccccctggggtcctgtcactcaaactggctgacccaatagccatcgtcaatgggaatgtctcactcaaagtgggagggggtctcactttgcaagatggaactggaaaactaacagtcaatgctgatccacctttgcaacttacaaacaacaaattagggattgctttggacgctccatttgatgttatagacaataaactcacattgttagcgggccatggcttgtctattataacaaaagaaacatcaacactgcctggcttgattaatactcttgtagtattaactggaaagggtattggaacagaatcaacagataatggcggaagcgtatgtgttagagttggagaaggtggcggcttatcatttaataatgatggagacttggtagcatttaataaaaaagaagataagcgcaccctatggacaactccagacacatctccaaattgcaagattgatcaagataaggactctaagttaactctggtccttacaaagtgtggaagtcaaatattggctaatgtgtcattaattgtcgtagctggtaagtacaaaattatcaataacaatactcaaccagctctcaaaggatttaccattaaattattgtttgatgaaaatggagtacttatggaatcttcaaatcttggtaaatcatattggaactttagaaatgaaaattcaattatgtcaacagcttatgaaaaagctattggattcatgcctaatttggtagcctatccaaaacctaccgctggctctaaaaaatatgcaagagatatagtttatggaaacatctaccttggtggaaagccagatcaaccagtaaccattaaaactacctttaatcaggaaactggatgtgaatattctatcacatttgattttagttgggccaagacttatgtaaatgttgaatttgaaacaacctcttttaccttttcctatatcgcccaagaatgaaagaccaataaacgtgtttttcatttcaaaattttcatgtatctttattgatttttacaccagcacgggtagtcagtctcccaccaccagcccatttcacagtgtacactgttctctcagcacgggtggccttaaatagggaaatgttctcattagtgcgggaactggacttggggtctataatccacacagtttcctggcgagccaaacgggggtcggtgattgagatgaagccgtcctctgaaaagtcatccaagcgagcctcacagtccaaggtcacagtctggtggaatgagaagaacgcacagattcatactcggaaaacaggatgggtctgtgcctctccatcagcgccctcagcagtctctgccgccggggctcggtgcggctgctgcagattggatcgggatcgcaagtctctctgactataatccccacagccttcagcatcagtctcctggtgcgtcgggcacagcaccgcatcctgatctctgccatgttctcacagtaagtgcagcacataatcaccatgttattcagcagcccataattcagggcgctccagccaaagctcatgttggggatgatggaacccacgtgaccatcgtaccagatgcggcagtatatcaggtgcctgcccctcataaacacactgcccatatacatgatctctttgggcatgtttctgttcacaatctgacggtaccaggggaagcgctggttgaacatgcacccgtaaatgactctcctgaaccacacggccagcagggtgcctcccgcccgacactgcagggagcccggggatgaacagtggcaatgcaggatccagcgctcgtacccgctcaccatctgagctctcaccaagtccagggtagcagggcacaggcacactgacatacatctttttaaaatttttatttcctctggggtcaggatcatatcccaggggactggaaactcttggagcagggtaaagccagcagcacatggtaatccacggacagaacttacattatgataatctgcatgatcacaatcgggcaacaggggatgttgttcagtcagtgaagccctggtttcctcatcagatcgtggtaaacgggccctgcgatatggatgatggcggagcgagctggattgaatctcggtttgcattgtagtggattctcttgcgtaccttgtcgtacttctgccagcagaaatgggcccttgaacagcagatacccctcctgcggccgtcctttcgctgctgccgctcagtcatccaactgaagtacatccattctcgaagattctggagaagttcctctgcatctgatgaaataaaaaacccgtccatgcgaattcccctcatcacatcagccaggactctgtaggccatccccatccagttaatgctgccttgtctatcattcagagggggcggtggcaggattggaagaaccatttttattccaaacggtctcgaaggacgataaagtgcaagtcacgcaggtgacagcgttcccctccgctgtgctggtggaaacagacagccaggtcaaaacccactctattttcaaggtgctcgaccgtggcttcgagcagtggctctacgcgtacatccagcataagaatcacattaaaggctggccctccatcgatttcatcaatcatcaggttacattcctgcaccatccccaggtaattctcatttttccagccttgaattatctctacaaattgttggtgtaagtccactccgcacatgtggaaaagctcccacagtgccccctccactttcataatcaggcagaccttcataatagaaacagatcctgctgctccaccacctgcagcgtgttcaaaacaacaagattcaataaggttctgccctccgccctgagctcgcgcctcaatgtcagctgcaaaaagtcacttaagtcctgggccactacagctgacaattcagagccagggctaagcgtgggactggcaagcgtaagggaaaactttaatgctccaaagctagcacccaaaaactgcatgctggaataagctctctttgtgtctccggtgatgccttccaaaatgtgagtgataaagcgtggtagtttttctttaatcatttgcgtaatagaaaagtcctctaaataagtcactaggaccccagggaccacaatgtggtagcttacaccgcgtcgctgaagcatggttagtagagatgagagtctgaaaaacagaaagcatgcactaaactaaggtggctatttttactgaaggaaaaatcactctctccagcaacagggtacccactgggtggcccttgcggacatacaaaaatcggtccgtgtgattaaaaagcagcacagtaagttcctgtcttcttccggcaaaaatcacatcggactgggttagtatgtccctggcatggtagtcattcaaggccataaatctgccctgatatccagtaggaaccagcacactcacttttaggtgaagcaataccaccccatgcggaggaatgtggaaagattcagggcaaaagaaggtatatctattgctagtcccttcctggacgggagcgatccctccaggactatctatgaaagcatacagagattcagccatagctcagcccgcttaccagtagacagagagcacagcagtacaagcgccaacagcagcgactgactacccactaacccagctccctatttaaaggcaccttacactgacgtaatgaccaaaggtctaaaaaccccgccaaaaaaacacacacgccctgggtgttttttcgcgaaaacacttccgcgttctcacttcctcgtatcgatttcgtgactcaacttccgggttcccacgttacgtcacttctgcccttacatgtaactcagtcgtagggcgccatgttgcccacgtccaaaatggtttccatgtccagccacgcctccgcggcgaccgttagccgtgcgtcgtgacgtcatttgcatcgtcttctctcgtccaatcagcgttggctccgccccgaaaccgttaaaattcaaaagctcatttgcatattaacttttgtttactttgtggggtatattatatagatag

SEQ ID NO: 141 - DNA, 34794 bp, Human adenovirus type 11; identical to SEQ ID NO: 138

SEQ ID NO: 142 - DNA, 34125 bp, Human adenovirus A
cctatctaataatataccttatactggactagtgccaatattaaaatgaagtgggcgtagtgtgtaatttgattgggtggaggtgtggctttggcgtgcttgtaagtttgggcggatgaggaagtggggcgcggcgtgggagccgggcgcgccggatgtgacgttttagacgccattttacacggaaatgatgttttttgggcgttgtttgtgcaaattttgtgttttaggcgcgaaaactgaaatgcggaagtgaaaattgatgacggcaattttattataggcgcggaatatttaccgagggcagagtgaactctgagcctctacgtgtgggtttcgatacgtgagcgacggggaaactccacgttggcgctcaaagggcgcgtttattgttctgtcagctgatcgtttgggtatttaatgccgccgtgttcgtcaagaggccactcttgagtgccagcgagaagagttttctctgccagctcattttcacggcgccattatgagaactgaaatgactcccttggtcctgtcgtatcaggaagctgacgacatattggagcatttggtggacaacttttttaacgaggtacccagtgatgatgatctttatgttccgtctctttacgaactgtatgatcttgatgtggagtctgccggtgaagataataatgaacaggcggtgaatgagttttttcccgaatcgcttattttagctgccagtgaggggttgtttttaccggagcctcctgtactttctcctgtctgtgagcctattgggggcgaatgtatgccacaactgcaccctgaagatatggatttattgtgctacgagatgggctttccctgtagcgattcggaagacgagcaagacgagaacggaatggcgcatgtttctgcatccgcagctgctgctgccgctgatagggaacgtgaggagtttcagttagaccatccagagttgcccggacacaattgtaagtcctgtgagcaccaccggaatagtactggaaatactgacttaatgtgctctttgtgctatctgcgagcctacaacatgttcatttacagtaagtgtgctatgggaggtgggaggtgatttttttttcttaagcagtgaaaaataatattttgttgtttttaggtcctgtttccgataatgagcctgaacctaatagcactttggatggcgatgagcgaccctcacccccgaaactaggaagtgcggttccagaaggagtaataaaacctgtgcctcagcgggtgactgggaggcgtagatgtgctgtggaaagcattttggatttgattcaagaggaagaaagagaacaaacagtgcctgttgatctgtcagtgaaacgccctagatgtaattaatggactttgagcacctgggcaataaaataggggtaatgtggtttttgtgagtcatgtataataaaactggtttcggttgaagtgtcttgttaatgtttgtttgggcgtggttaaacagggatataaagctgggttggtgttgctttgaatagttcatcttagtaatggagttggaaactgtgctgcaaagttttcagagcgttcgccagctcttgcagtatacctctaaaaacacttcaggtttttggaggtatctgtttggctctaccttaagcaaggtggtaaatagggtgaaagaagactatagagaggaatttgaaaacatattggccgactgtccagggcttttggcttcactagacctttgttaccacttggtgtttcaggaaaaagtggtcagatccttagatttttcatctgtgggacgaacggttgcttctattgcttttttggcaaccatattggataaatggagcgagaaatcccacctgagttgggattacatgctggattacatgtcaatgcagctgtggagggcatggctgaagaggagggtttgcatttactcgctggcgcggcctttgaccatgccgccgctgccgacgttgcaagaggagaaggaggaggagcggaaccctgcggtggtggagaagtaaacatggaacaacaggtgcaagaaggccatgtacttgactctggcgaagggcctagttgcgcagatgatagagataagcaggaaaaaaaagaaagtttaaaggaagctgctgttcttagtaggctaactgttaatctgatgtcccgcccgcgtttggaaactgtatattggcaggagttgcaggatgaatttcagcggggtgatatgcatttacagtacaaatacagttttgaacaattaaaaacccactggttagagccatgggaggatatggagtgtgctattaaagcttttgctaaattggccttacgtcctgattgtagctacagaattactaaaacagtaaccattacttcatgcgcctatattataggtaacggggcaatagttgaggtagatacaagcgacagagttgcttttagatgtcgaatgcagggtatgggcccaggggtggtgggtttggatggaattacatttataaatgttaggtttgctggagataagtttaaaggcattatgttcgaagctaatacctgtcttgtcttgcatggtgtttactttcttaactttagtaacatttgtgtagagtcttggaataaggtttctgctaggggctgtactttttatggatgttggaagggtttggtgggtagaccaaaaagtaaactgtctgtaaaaaagtgtttgtttgaaaaatgtgtacttgctttaattgtagagggggatgcacatattaggcataatgcagcttcagaaaatgcctgttttgtattattgaagggaatggctattttaaagcataatatggtttgtggggtgtctgatcaaactatgcgacgttttgttacctgtgctgatggaaattgtcataccttaaaaactgttcatattgtgagccacagtagacattgttggcctgtatgtgatcataacatgtttatgcgctgtaccatacatttaggcttaaggcggggtatgtttagaccttcccaatgtaacttcagccactcaaacattatgctggaacctgaagtgttttctagagtgtgtttaaatggggtatttgatttatctgtggaattatgtaaggttataagatataatgatgatactcgacatcgttgccgacagtgtgagtgtggtagcagtcatctagaacttcgtcccattgtgctaaatgtaactgaggagctgagaagtgaccaccttaccctgtcttgcctgcggactgactatgagtcaagtgatgaagacgacaactgaggtaagtgggtggagctaggtgggattataaaaggctggaagtcaactaaaaattgtttttgttcttttaacagcacgatgaacggaactactcagaacaacgctgcgctttttgatggaggggtttttagcccttatttgacttccaggttaccatattgggccggagtacgtcagaatgtggtaggatctacagtggacggtcgacctgtggcacctgcaaattcatcaacattaacctatgcaactattggaccctcgcctttggataccgccgccgccgctgcagcttccgcggccgcttctacggctcgcagtatggcagctgatttcagcttctacaatcacttggcttcgaatgctgtgacacgcaccgcagttcgagaggacattctgactgttatgcttgccaagcttgaaactctaactgctcagctggaagagctatcgcaaaaggttgaggaattagctgatgctactacccataccccagcccaacctgtaacccaataaagaaaaaacttaaattgagatggtgttatgaatctttattgatacttgttttttctgacatggtaagctcttgaccaccgttccctatcattaagaacacggtgaatgtgttccagtattttgtaaagatgagcctgtatattaaggtacattggcattaggccatctttgggatgaaggtaggaccattgaagggcttcatgttccgggttagtgttgtagataatccagtcatagcaacaacgctgggcatggtgattaaatatatcttttaacaacaagctaattgctaatggaagacctttagtataggtattgataaaacggttaagctgggtgggatgcatccgaggtgacatgatatgaagttttgattgtattttgagattggcaatgttacctgccaaatctcttcttggattcatattgtggagaaccacgaaaacggtgtagccagtacacttgggaaatttgtcatggagtttagaaggaaaggcatggaaaaacttggaaacgcctttgtgacttcccaaattttccatacactcatccattattatggcaattggaccgcgagcagcggcttgagcaaaaatgttttctggatcagaaacatcatagttgtggtctagagttaggtcatcgtaggacaacttaacaaatttaggacacagcgttccagattgtggaataatagttccctctggtcctgggacataatttccctcacaaatttgcatttcccaagatttaatttcagatgggggaatcatgtccacttgcggaacaataaaaaaaacagtttctggagcaggtgtaaccagctgggcagaaagcaaattacgcaacaactgagacttcccacagccagtgggtccataaattaccccaattacaggttgcaagtgatagtttaacgaggtgcagctgccgtcttcgtggagaagcggagccacttcattcatcatttgtcggacgcggatgttttgcttggccagttcccctaacagacgctctccgcctaaggaaagtaactcttgtaaagatttgaaatttttaagtggctttaggccatcggccataggcatgtggtccagggtttgcttcagcagttgcaagcgatcccatagctcagttatattttctatgccatctcgatccagcaaacttcctcgttgcgggggtttggctggctgttgctgtaaggaacgaggcggtgagcatccaaatggacgagggttttgtccttccagggacgtaatgtgcgcgtcagggttgtttcggtcacggtgaatggatgcgctcctggttgagcgctggccagtgtgcgctttaaactgaggcggctggtgctgaagcgcgtgtcttctccctgtgcttcggcaaggtagcattttaacataagatcataagacaaagcctctgtagcgtggcctttagcccgtatttttcctttggaggtgctcccgcagtgaggacactgaaggcatttaagggcgtacagttttggagccaaaaaaacagattctggagaataagcatctgcgccacaataactacaaacagtttcacattcaactgaccaggtcagctcaggacatgatggatcaaaaacaagtttccctccgtactttttgatgcgtttcttaccttgcgactccataaggcggcgtcctttctctgtgacaaaaagactgtcagtgtctccgtatacagatttaaggggtctatccttcagtggtattccgcggtcctcctcgtacaggaattctgaccactctgacacaaaagctctagtccaagcaagtacaaaggaagccacatgggaagggtaccgatcgttgttaattaaagggttagaactttctaaggtgtgtaaacacatgtctccttcttcagcgtccatgaatgtgattggtttgtaggtgtaagtcacgtgttcacaattttctggtggtgggctataaaaaggggcgggtccttggtcttcatcgctttcttctgcttcgctgtttacgagcgccaactggttgggtgagtacacgcgctcaaaggcaggcattacctctgtactcaacgtgtcagtttctataaacgatgaggatttgatgtttaatcgccccgctgcaatttctttcattaggctttcttccatttgatcagaaaaaactatttttttgttatctagtttggtagcaaaagatccgtacaaggcattggaaagcagcttggctatagatcttagggtttgatttttgtccctatcggcccgttcttttgcggcaatattgagttgcacatattcgcgtgccaggcatttccaggtggggaaaatggtggtgcgctcgtcagatagcaagcgtaagcgccacccgcgattatgcagtgtaaccagatctacgctggtaactacttcaccgcgcaagctttcattggtccaggctaaacgaccgccttttctagaacaaaaaggaggaagaacatccaactgattttcatctggggggtcggcatctatagtaaaaatgccaggacaaagatttttgtcaaaataatcaattttgcaagtgtaattttccagcgccacctgccattgccgcacggccaatgcccgctcataggggttaaggggaggaccccaaggcatggggtgtgtgagggccgatgcatacatgccgcaaatatcatatacatatatgggctcttttagtactcctatgtaagtaggatagcacctgccgccacgaatgctggcgcgaacgtagtcatatagctcatgtgaaggcgccaggatgttgggcccaagatgtgtgcgctgtggtttttcggcgcggtacaaaatttgtctgaaaattgcatgagagttagaggaaatggtaggacgctgaaacacattaaaatgtgccgcgtcaagacccactgcgtcagtaacaaactgggcgtatgagctacgcagtttttctaccaatgaggcagtcacaagtacatccagggcacaatagtttaatgtttccccgataagattgtaatttttttctcctttttttttccatagttcttgatttaggaggtattcctccttatccttccagtactcctccaggggaaacccatttgcatctgcacggtaagaaccaagcatataaaactgatttaccgccttgtacggacaacatcctttttctacaggcagggcatacgcttgtgcagcctttcttaaagatgtatgagtaagagcaaaggtatctctgaccattacttttaaatactggtatttaaaatcttggtcgtcacaccctccgtgttcccacagtaggaagttagttcgctttttgtagtggggattgggaagggcaaaagtaatatcattaaataatattttgccagctcttggaataaaatttctagaaattttaaagggtccagggacgtccaagcggttattgattacctgagcggcaagaacaatttcatcaaatccattaatattgtgtcctactatatacaactctacaaatcttggctcacccttaattgcaggggctcttttaagatcttcgtaggaaagatcttcaagcgcgactagtccgttttcttcttgagcccattgagacaagtgtggatttttttgtaaaaaagtcatccaaagatcagtagctaaggaggtttgtaagcggtttctataggtacgaaactgttgaccgaccttcattttttctggggttaagcagtagaaagtagtagagtctttttcccattggtcccatccaagttctaatgcaagttgtaaggcatgtttgacaagattgtcatccccagacagtttcatcaccagcataaatgggacaagttgctttccaaatgcccccatccaggtgtaggtttctacatcataggtaataaaaaggcgctcagtgcgaggatgcgaaccgattgggaaaaagtggatctcctgccaccagttggaagaatggctgttgatgtgatgaaagtagaaatctcgtcggcggacagagcattcatgctgatgtttgtaaaagcgtgcgcagtgttcgcatcgttgcacgggctgtatctgttgaatgaggtgtacctggcggcctcgcaccagaaagcagatgggaaaatcaataccacttggcagctgccgttcgtcctcttcctcttctgctgcattgccactaccgtttggatcctcgaaagcgagaacggagagggtgacggtgcccctcgacctgcatgtccagatttcagcacgagaggggcggaaacgggaaatcagggcgtacagcctggagctgtccatggtatcagtcagagagaaaagcatgtccgcggggacagcgcgcaagttgacttcgcacaggcgggtaagagcaggctggaggtgcaggtaatacttaatttctagaggcgtgccgttggcagagtctattgcgtgaagtattccatgagcccggggactaaccacggttccacggtgcacttttccaatgcgcctgcttaaaatcggcggcgcggacgagctcccggaggaagcggcggttcgggtcctgcgggaagcgggggaagcggtatgtcggcctgacgctctggcaggggaaggtgttgagcccgaagttgactggcatgggcgactacccggcgattgatatcttgaatctgtcggcgttgtgtaaacactaccggccctgttgttttgaacctgaaagaaagttcaacagaatcaatctcagtgtcatttactgcagcctgtcttaaaatctcctgaacgtcgcctgagttatcttggtaggcaatttctgccattaattgatcaatttcttcctcctggaggtctccatgtcccgcacgttcaatagtggctgcaaggtcattagatatccgactcataagctgtgaaaatgcgtttagtccaatttcgttccagactcggctgtatactacccctccttcgctgtcccgagcgcgcataaccacttgcgccaagttgagttccacgagccgtgcgaacacgccgtagttgcgcaagcgctgaaacaggtagtttaaggtggtggcaacgtgttctgagacgaagaaatacagaatccaccgacgaagcgtcagctcgttgatgtcacctaaggcttcaagacgttccatggcttcgtaaaagtctactgcaaaattgaaaaactgggagttgcgagctgccaccgtcaattcttcttccaacagacgaataagctcggccaccgtctcgcgcacttcttgctgaaatgcgcccggaactatttcttgttcttcctcttctacctccattatttcttcctcgaccacaggtggtgggggttgtcttcttcgacgccggcgaacgggcagcctgtctacaaatctttcaatcatttcgccgcgacggcggcgcatagtttcggttactgctcgaccgttttcacgtggtcgtaactcaaaaactccacctctaagttctgtttcatgtaaaatgggaaatgaggcgttgcgaggggcgttaggtagggatacagcgctgattatgcattttattatttgctgcgtaggaactccgcgcaaggagctaagcgtctgcatatccaccgggtcggagaacctttcaagaaaggcatctagccagtcacagtcacaaggtaggctaagttttgtttcttctaaagtaccaggaagctgagcaatgctactaataatgtaattgaagtaagctgttttaagcccacgaatggttttaagaagcaccacatctttgggtccggcttgttgaattcgcaggcggtctgccattccccacacgtcactttgacatcgtccaagatctttgtagtagtcttgcattaacctttccacctctacctcgcggtttccgcgatcagccatgtgcgtgcttccgtagccttgcagcggttgtaataaagctaaatctgccactacccgttccgcaagcactgcctgttgaatttgggtaagggtggttgcaaagtcatccacatctacaaagcggtgataagctcctgcattaatggtgtagctgcagtttgtcattactgaccaattaacagtttgcgtgcctggctgtacagtttctgtgtatcgcaagcgtgagtaagcccgagagtcaaaaacatagtcattgcaggtgcgcactaggtattgatagcccacaaggaaatgaggaggaggttcgcgatacaacggccagccaagcgtagccgcagcacctggagcgagatcttccaacatgaggcggtggtattcatatatgtatctggacatccatgtgatgccggcagcggtagttgttgctcgcataaattcgcgggctcggttccaaatattgcgcaggggtaaaaagcgttcaatagttgccacgctttgaccggtcaggcgtgcgcagtcttgaatgctctggacatggaaaaaatgaaagttggtaagcgactcccttccgtggtttggtggaaaagtcacaagggtaccatagcgaggaaccccggttcgaaaccggcaggatccgctatgagcacaagtgaggcgcttgcgcgttgaacccggccaaggacccccagacacggagaggagtctttttttatttattttttcttagatgcatcctgtcctgcgacaaatgcgacctcagcccagggcaaccacggcctcagcagcggtggcgctttcgggctctggcgaacaggaagagcctcaatgtcctacattggagttggaagaaggagaaggcatagcccgattgggcgcccactctcctgagcgtcacccaagggtgcagctcgcccgggacagtcgcgtggcatttgtgcctcgtcagaacatgtttcgcgacaacagcggggaggaagctgaggaaatgcgagactgcaggtttagggccggtcgcgagctgcgccgcggatttaatcgcgagcgactgctgcgtgaggaggactttgagccagatgaacattcggggattagttctgcacgggcccatgtatcagcagccaacttagtaacagcatatgaacaaacggttacagaggaacgtaactttcaaaaaagctttaataaccatgtgcgcacactaatagcgcgagaagaagtagccattggtttaatgcatctttgggactttgtagaagcttatgtacataatccagcaagtaaacccctaactgcccagctgttcttaatagttcaacatagtagagacaatgaaacttttagggatgcaatgcttaacatagctgaaccccagggtcggtggttactcgatttaattaacattctgcagagcattgtggttcaggaacgcagtcttagtttggcagacaaggtggccgccattaattactccatgttaagtttgggaaagttttatgctcgtaaaatctacaaaagtccgtatgttcccattgacaaggaagtgaagatagacagcttttatatgcgcatggctttaaaggtactaacattaagcgacgatcttggagtgtaccgcaatgaccgaatccacaaagcagtaagcgccagtcgccgcagagagctaagcgacaaagagcttatgcatagcttacaaagggcgctgacgggagcaggaacagaggacgagtcgttctttgatatgggcgcagacctacggtggcagccaagcgctcgcgctttggaggcagctggagtggcgtctgctgacgtcactggcgatgacgatgacgaagaccagtacgaggactgatcggccgtaccttttgttagatgcagcgaccggcgatcatcgcggagagggctcctaacctggatcccgcggttttggcggccatgcaaagccagccttctggcgttacagcttcagatgactggacagcggccatggatcgtattatggctttaacggcgcgcagtcctgatgcttttcgccagcagccccaagctaaccgcttttcggccattttggaagcagtagtgccgtctcgtactaaccctactcacgagaaagtgttaaccattgtaaatgctttgttggatagcaaagccatccgcaaagatgaggctggtttaatatacaacgctttgcttgagcgcgtggcacgctataacagtaccaatgtgcaggctaacttagaccggatgggtacagatgtaaaggaggcgctggctcaacgagagcgctttcatcgcgatggtaatcttggttcgctagtagcattaaacgcttttttgagtactcagccggctaatgttccgcgtggtcaggaagattatacaaacttcatcagcgccttgcgactaatggttactgaagtgcctcaaagtgaagtgtatcagtctggacccgattacttttttcaaacgtccaggcagggtttgcaaaccgtaaacttaactcaggcttttaaaaatttgcaaggtttgtggggggttcgtgctccagtaggcgatcgttcaactttgtccagtttactaacaccaaactcgcgcctattactgttgctaattgccccctttaccaacaccaacagtttaagtcgagattcatacctgggtcacttagttactttgtaccgcgaagccattggtcaagcgcaggtagacgaacaaacttatcaagaaataaccagtgttagtcgcgcactgggccaggaggacactggcagtttagaggccacacttaactttttactaactaaccgtcgccagcaagtgcctcctcagtacactttaaatgcggaagaagaacgcatattgcgctatgtacagcaatctgtaagtttgtatcttatgcgtgagggtgccacccccagtgccgccttagacatgacagcgcgcaatatggagccgtccttctacgcttccaatcgagctttcattaatcgcttgatggattaccttcaccgcgctgcggccatgaacggggaatactttacaaatgcaattctaaatccgcattggttgccccctcctggattttacactggtgaatttgatttgccggaaggaaatgatggctttttgtgggatgatgttacggacagtctgtttagtcctgcagttattggacaccatggtaaaaaggaagcaggtgatgaaggtcccttgcttgactctcgggcgagttctccattccccagtttaactagtttacccgccagtgttaacagcggtcgtaccaccagaccccgactaacaggtgaaagtgaatacttaaatgaccccatcttgtttccagtgcgcgacaaaaattttcccaacaatggcatagaaagtttggtagataaaatgtctcgctggaaaacatatgcacaagagcggcgagaatgggaggaaagacagccaagaccagttcgccctcctaggcaacgttggcagcgacgcaaaaaaggggcacatgcgggggatgaaggaagcgatgactcagctgacgacagtagtgtattagatttaggagggtcaggaaacccatttgctcatttgcgcccacagggttgcatagggtcattgtattaaattgaataaaagcatacttaccaaagccatggcgaccagtgttcgtcttattttccttcttccgttagctgtgaaatgaggcgcgcggtggaactgcagacagtggcttttcctgagacaccacctccctcttacgaaaccgtgatggcagcggcgccaccctacgtgcctccccgctatttgggtcctacggagggaagaaacagtatccgttactcggaattgtcaccgttgtacgataccactcgagtgtacttggtggacaacaagtcttctgacattgcttcattgaattaccagaatgatcacagcaactttttaaccactgtagtgcaaaataatgactattcccctatagaggctggcacgcaaactattaactttgatgaaaggtctagatggggtggagatttaaaaaccatcttacataccaacatgccaaacgtgaacgattttatgtttaccaccaaatttaaggccagggtaatggtggctaggaaaacaaacaacgaaggccaaaccattttagaatatgagtgggcagaatttgtgctacccgagggtaactattcggaaaccatgactattgacttaatgaacaatgctattattgagcattatttgcgagtaggaagacagcatggagtgctggaaagtgacattggagttaagtttgacaccagaaactttcgtctgggttgggaccccgaaacccaattagtaactccgggagtgtacactaatgaggcttttcatccagatatagtactgcttccaggttgcggggttgattttacagagagcagattaagcaacatactaggtataagaaagaggcagccgtttcaggaaggatttgtgattatgtatgaacacttagagggaggcaatattccagctcttttggatgtaaaaaaatacgaaaacagtctgcaggatcaaaacactgtaagaggagacaactttattgccttaaataaggctgctaggattgaaccggttgaaacagaccccaaaggacgcagttacaacttgcttccagacaaaaaaaatactaaatatcgcagctggtatttggcatacaactacggagacccagaaaaaggagttcggtcatggactctactaacaactccagatgtaacaggcggctccgaacaggtgtactggtccctacccgatatgatgcaagatccggtgacttttcgctcctcgcgtcaagttagcaactatcctgtagttgcagcagaattactgccagttcatgctaaaagcttctacaacgagcaagccgtctactcacagcttattcgccagtcaaccgcgcttacgcgcgtgtttaatcgctttcccgagaaccagatactggtgcgtccaccagccgctaccatcactaccgtcagtgaaaacgttcccgcccttacagatcacgggaccctgccgctgcgtagcagtatcagtggagttcagcgagtcaccatcactgacgcccgccgccggacctgtccctacgtttacaaagcactgggcatagtttctccacgagtgctttctagtcgcactttttaaaaaagtgtggtaacatgtccattttggtttcgccaagtaacaacacgggctggggactgggtgccgcccgcatgtatggaggagctaaaacaaggtctagccaacatccagtgcgcgtacgcggacattaccgagctccatggggcgcgcatacccgaggacgcactggtcgcaccactgtagacgatgttattgactcggtagtggccgatgctcgcaagtaccgcgcgcccgctgaaacagcagggtctactgttgatgcagtaattgatgaggtagtggcaaacgcgcgggcttatgcaaggcgccgcagacggctgcgtcgccggcgtagaccaaccaccgccatgcgcgcggccagagcgttggttcgacgggccaggcgcattgggcggcgagctatgatgcgggcagccaggcgggctgcaacgcctgccggtcgagcgcggagacgggccgcagctgcggccgcaacagctattgcaaacctagctgctccgcgacgaggaaatgtatactgggtgcgcgactcagtgaccgggacgcgtgtgccagttcgtacgcgtccacctcacccttagaagacaaagagtgactcaatgtctgttatgtatgcccagcatgaccaaacgcaagttcaaagaagagctgctgcaggccttagcgcctgaaatatatggcccatcggataaccttaccaagcgcgatatcaagcatgttaaaaaacgggaaaaaaaagaggaagaagtcgccgcggcgtcagcagacggcgtcgagtttgtgcgctcatttgcgcccagacgtagggtacagtggaagggacggcaagtaaaacgcattttgcgaccgggcaccacagtggttttttctcccggagagcgaacgattatgcgtcccctaaagcgcgagtacgacgaagtgtacgcagacgatgacattttggagcaagcggcacaacagactggggaatttgcatatggaaaaaaagggcgttacggagacaaaattgctattcctttggacgagggaaatccaacacccagtttaaaggctgtcactttgcaacaagtgttgcccgtccttgggccttcggaagaaaagcgtggaattaaaagggaagccatggatgaattgcagcctacaatgcaactgatggtgcctaagcggcaaaagttagaggacgtactagagcacatgaaggtggatcctagcgtacagccagatgtaaaagtacgtccgataaaaaaggtagctccaggattgggagttcaaacagtggacattcaaattcctgtgcaaactgcattgggtgaaactatggaaatccaaacttcgccaataaaaacaacggtgaacgcaagcgtgcaaacagacccttggtacccgccagtgctttcaacaaaaaaaaagcgtcactacagacaaacaagttcgcttttgccagactacgttttacatccttccattgtgcccacgcctgggtaccgtgggacaacttttcagcgccgagccacagcccctagccgtagacgaggtccatcacgccgtagacgtcgacgcaaagccactttagccccagcggcagtacgtcgcgttgtacaaagggggcgcacactaatacttccatccgtgcgttaccaccctagcattctctaacaagctgcgctgccgttttttcagatggctcttacttgccgaatgcgcatacccattccaggatacagaggacgaccccgccggaggaaagggctgaccgggaacggtcgatttcggcggcgtagtatgcgcagacgcatgaagggtggggtgctgcccttcctaattccacttattgctgcggccattggagccgttcccggaattgcctcagtagccttgcaggcttctcgaaaaaattaaaataaaataaaacttccaacttattactggtactatgactgttttatgcagactaaatggaagacatcaatttttcgtcgctggccccgcgacacggcacgcggccgtacatgggcacctggaacgagatcggcacgagccagctgaacgggggcgccttcaattggaacagtatctggagcggtcttaaaaattttggttccacgattaagacatatggcaccaaggcgtggaacagccaaaccggccagatgctaagggacaagttaaaagaccaaaattttcaacagaaagttgtagatggtctggcttcgggaattaatggagttgtagacatagccaatcaggctgtacagaaaaaaattgccaaccgtttagagccgcggcccgacgaggtaatggtagaggaaaagctgccacctctagaaactgtgcccggatccgttccaaccaaaggagaaaagcggccacggccggatgcagaggaaaccttagtaacgcacacaacagaaccgccgtcctatgaggaagcaataaaacaaggagccgctctgtcacctaccacctatcccatgaccaagcctattttacccatggctactagagtgtatggaaaaaacgaaaatgtgcctatgacccttgagctgcctcctttgccagaacccactatcgcggatcccgtaggttccgttcctgttgcatctgttccagttgcatcgacagtgagccgtccagcagtgcggcctgttgccgtggctagcttgcgaaacccacgatccagtaattggcaaagtaccctaaacagtattgtgggactgggagtaaagtctctcaaacgccgacgctgctactaacattaaaagacgagtgttaattcccatctgtgtatacgcctcctatgttagcgccagaggaccaacgcgtgaatcgcagtcaccaccagcgctttcaagatggccactccctcgatgatgccgcagtggtcttacatgcacatcgccggtcaggatgcctcggagtacctgagtcccggtctggtgcaattcgcccgcgccacggacacctacttcaccctgggaaacaagtttagaaaccccaccgtggctcccacccatgatgttaccaccgatcgctcgcagcgtctgacgctgcgttttgtgcccgtggatcgggaagatactacctactcctacaaggctcgctttacgctggctgtgggtgacaaccgcgtgttagacatggctagttcttactttgacattcgaggggtactggatcgtggtcccagttttaagccctattccggaaccgcctacaattctttggcaccaaaaggcgctcctaatgcttcacaatggtcagataacgctaagcttaatacctttgctcaggcgccgtatcttagcgacactatcaccgccgccgatggtattaaagttggaacagacaccgcccaggcaggcgcggcggtgtatgccaacaaaacttatcagccagagccgcaagtaggaccaagtgaatggaacaccagcattgaaaacgttaaagctggcgggagggcattaaagcaaaccactgcaatgcagccgtgctatggctcctacgctcgtccaaccaacgaacacggaggacaatccaaggatgacaacattgaacttaagttctttgattcagctaacaatgcagcaaacactgctcaagttgtgttctataccgaagacgtaaaccttgaaatgccagacacgcatcttgtgtttaagcctactgttaccaatggaacaattgcttctgagtcgctgttgggacagcaagcagcgccaaatagagcaaactacattgcattcagagataattttattggcctgatgtattacaacagtacaggcaacatgggtgtattggccgggcaagcttcccaacttaacgcagtagtagacctgcaagacagaaatacagagctgtcataccagttaatgctggatgctttgggagacagaacacggtacttttccttgtggaattccgcagtggacagttacgaccctgacgttcgcgttattgagaatcacggggtagaggatgaactaccaaattattgctttcctcttagcgcagtaggtgaaataaaaaattacaaaggcattaagccagataacggaggaggaggtggctggactgccgacaacactgtcagtgaagcaaaccacataggcattgggaatatagccgccatggaaattaatttgcaggctaatttgtggagaagcttcttgtactcaaatgtgggcttatacctaccagacgacttaaaatacactccaggaaacataaaactacctgataacaagaacacctacgagtacatgaacgggcgtgtgactgccccggggttggtggatacctatgtcaatatcggcgctcgctggtccccagatgtgatggataatgtaaacccttttaaccaccaccgaaacgcagggttgcgctacagatccatgttgctaggcaatgggagatttgttccttttcacattcaggtgccgcaaaaattttttgccatcagaaatttgttgctgttgcccggttcctacacttacgaatggaactttagaaaggatgtaaacatgattcttcagagcacactgggaaatgatcttcgggtggacggagccagcgttcgctttgacaacattgccctgtatgctaacttttttcccatggcacataacacagcttctactttagaagccatgttaagaaatgacaccaacgaccagtcttttaacgattatttgtgtgctgcaaacatgctgtatcccatcccagctaacgccaccagcgtgcccatttcaataccttcgcgaaattgggcggcatttagaggctggagctttactcgcctaaaaactaaagaaactccttccctgggttcagggtttgacccctactttgtatactctggaaccattccctatttagacggcaccttttacctaaaccacacttttaagaaggtgtcaatcatgtttgactcctccgtgagttggcctggaaatgaccgtttgctaaccccaaatgaatttgaaataaagcgttctgtggatggggagggatacaatgtggcccaatgcaatatgactaaggattggttcctaatacaaatgcttagtcattacaacattggataccaaggtttttacattccagagagctacaaggaccgcatgtattctttctttagaaactttcagcccatgagtaggcaagttgtggataccacagaatataagaactacaaaaaagtaaccgtagagtttcaacataacaactcaggattcgtgggatacctgggccccactatgcgggagggacaagcttaccccgccaactatccctaccctcttataggccaaacagctgtggaaagcatcacacagaaaaagtttctatgcgatcgtgttatgtggcgcatcccattttctagtaacttcatgtctatgggggcgctaacggatcttgggcaaaatatgctgtacgcaaactcagcccatgctctagacatgacatttgaggtggatccaatggatgagcctacccttctttatgttttatttgaagttttcgacgtggtacgcattcaccagccacaccgcggcgtcattgaagcggtctacctgcgcacgcccttctcggcgggtaacgctaccacctaagaaggcaccctcccagactgctgtaatgggttcaagcgaacaggagctgacggccattgttcgagatctaggctgtggaccctattttttgggaacctttgacaaacgttttccgggttttgtgtctcgcgaccgcttatcatgtgctattgttaacactgccggtcgcgaaactgggggcgtacactggctggcttttggatggaaccccaaatcgcacacttgctatttattcgatccatttggattttctgatcaacgactaaaacaaatctatcagtttgagtacgaaagtctgttgcgccgtagtgcgctagcggccactaaagaccgatgcgttaccctagaaaagtcaacccaaactgtacaaggaccgttttctgcagcgtgcggcctgttttgttgtatgttcttacacgcttttactcactggcctgaccatccaatggataaaaatcccactatggacctacttactggggtgcctaattgtatgctacaaagtcctcaggtagtgggcacattgcaacgcaatcagaatgaattgtataaattcttaaacaatctgtccccttactttcgtcacaaccgcgagcgcatagaaaaagctacatcttttactaaaatgcaaaatggactcaaataaacgtgtacacaatgcattaataataaaaccattttattagctcattggagtacaagcttgactgttttattaaaaatcaaatggctcttcgcgacagtcgccgtggttggtgggcagggatatgtttctgtactgcaaacgctgatgccacttgaattctggaataacaagcctagggggggagccgtcaaaattttctccccacagctggcgcacaagttgcagggcgcccataacatcaggagcagaaatcttgaagtcgcaattagggccagcattgccgcgcgcattgcgataaactggatttgcgcactgaaaaaccaacaaacacggatacttaatactggctaacgctccagggtcggttacttcgttgatatcaatgttatccacattgctgaggttaaaaggagtgattttacacagttgacgccccatccgtggcaggccatcttgcttgtttaaacattcgcagcgcactggcataaggagacgtttttgcccatgtcgcatgtgagggtagtcggccagcataaaagcttcaatttgcctaaaagctatttgagccttcattccttcagaataaaacaagccgcaggactttccggagaaagaattattcccgcagccaacatcatgaaaacagcagcgggcatcgtcgtttttaatttgaactacattacgcccccagcggttttgcgccaccttggctttcgaggggttctctttcaacgctcgttgcccactttcgctggttacatccatttccaccaaatgctctttgcgcaccatctccattccatgcaggcatctaagctccccttcgcgctcggtacacttatgctcccacacgcagcaaccggtgggttcccaggaattctgttggacaccggcataagcttgcatatatccttgcaaaaagcgtcccatgagctcctgaaaggttttttgggatgaaaaagtcagctgcaaaccgcgcttttcttcgttgagccatgttgtgcatattttcttgtacacgctgccctgatccggcaaaaaacgaaaggtggcgcgctcgtcgtgatccacatggtacttttccattagcatagccatggcttccatgcctttttcccaagctgaaactaggggctggcttgccggattgcgaacaacaacaacattcttttcattttcgtcgctgttttgagcggaagccttcaaaacgtgtacctgcctggtttccattttttgaaaagactgagaaccgtctgcatgatgcataatgcggacgggcggcatgctgaaacccattactcctaaaactgctcttggtggttctgcctcttcttcttctgcactctctggggaaagaggtatcgcagccatagatttcttgacttttttctttggaggtaaaggcacagcttccagttcttcttcgctttcggaatccagaaagtatctgcccatttttggcggcggcggctgagcgctgcggtctggggtgcgctccctctgtgagtgctgattgctggccattatttaatcctaggcaaagaaacacatgatggatctggagccacaggaaagcttaaccgcccccaccgctcccgccattggcgctacggctgtcatggagaaggacaaaagtctactcataccccaagacgcaccggttgagcagaacttgggctacgagactccccccgaggaatttgaaggctttcttcaaatccaaaagcaaccaaatgagcaaaacgctgggctcgaggaccatgactacctaaacgagggagatgtcctgtttaaacatctacagcgacaaagcactatcgttcgcgacgccatatctgatcgctcttcaataccagtttcaattgcagaactatcttgcatctacgaacgcaacctgttctccccacgtgtgccccctaaacggcaagccaacggcacatgcgagccaaatcctcgccttaacttctacccagtttttgcagtgccagaagcactggcaacataccatattttctttaaaaatcacaaaatacccctatcctgtcgagctaaccgcagccgcgcagatgagcttcttgctttaagggctggcgcttccatacctgggattgtgtccttggaagaggtgcctaaaatttttgaaggtttaggtcgggatgaaaaacgagcagcaaatgccctgcaaaaagaaaatgaacaaaatcaccatgggaatagtgctctaatagaactggaaggtgacaatgcccgcctggcagttttaaagcgcaatattgaggttactcactttgcctacccggcagtaaatcttccgccaaaggtaatgagcgcagtgatgaatcagctactaattaagcgagcccaacccattgacaaagatgcaaacttgcaagacccggaggcaacagatgatggaaagccggttgtaagcgacgagcaattaactaagtggttgggaacagacaattccaacgaactacaacagcggcgtaaactcatgatggccgccgtacttgtaactgtggaactcgagtgcatgcatcgttttttctccgacatcaccacattgcgcaaaattgaggaatgtcttcactacactttccgccatggctacgtgcgccaagcctgtaaaatttctaatgtggagctgagcaatctagtttcttacatgggcatcttgcatgaaaaccgattgggacagaacgtgctacactcaacactacgcgatgaagcacgcagagattacgtgcgagactgcatttaccttttcctgttacatacctggcaaactgggatgggtgtttggcagcaatgcttggaagaaaaaaaccttcgagaactaaacaaactgttagacagagcactaaaatccctatggaccggttttgacgaacggacagtagctgcagagctagctgacataattttcccagaaaggttaatgataaccttgcaaaacggcttgcctgactttatgagtcaaagtatgctgcacaattatcgctcttttatattagagcgttctgggatgcttcctagcatgtgttgtgcacttccttcagattttgtgcctatatattttagagagtgcccccctcccctgtggagccactgctacttactacgacttgctaactacctagcttaccactcagaccttatgacagattcaagcggcgaaggcctaatggagtgtcactgccgctgcaatctttgcaccccccaccgttctttggtttgcaatactgaactattaagtgaaagtcaagtcattggtaccttcgaaatgcagggaccgcagtctgacagcaatttcacgacgaacctaagacttacccctgggctttggacttctgcctacctgcgcaaatttgaaccccaagattaccacgcccacagtatcaatttttacgaagaccaatccaaacccccaaaagcgccactaacggcttgcgtcattacgcagggaaaaattctagcccaattgcatgctattaagcaagcgcgcgaagagtttttacttaaaaaaggacacggagtgtaccttgatccccaaaccggcgaggaactaaaccttccatcacctttgtgtgctactgcgtctccccattcgcagcatgtccccgaaagccgcaaaacaggctattgcgcagcaacgctcaaagaaacagcagcaacggcaggaaatctgggaggaagaatcttgggagagtcaggcagaggacgaggtcgaggacttggaagaatgggaggaggaggaggcggacagcctagacgaggatccagaggaggaggaggaaggttccaaggacggagcgaccgccgccaaaccgtcgctttcaaccaagccctctccaatgaaacccgctgtgagcaaatctcagaaagccaaccgtagatgggacaccattgaaaccagcgccgcaaacttgggtaagaatcgcaagcaggcgcgtcggggctactgctcatggcgggctcaccaaagtaatattgtagcctgctttcagcactgcggggggaatatctcatttgcaaggcggtatttgctataccatgatggagtggcgattccaaggaatgtcctccattactaccgtcatctctacagcccctttgaagagctcgacaaggaaccgacctgcaacagccaagcggcccactagaatcggcaacagcagcaacaaggaaagtcctgaggcgcgcgagttaagaaaacgcatttttcccactttatatgctatttttcagcagagtcgaggtcaagaacacgaactgaaaataaaaaaccgttccctgcgttcacttacccgcagctgtctctacctcaaaagcgaagatcagttgcaacgcaccttgcaggacgcagaagctctgttcaataaatactgctccctctcgcttaaagagtaaaaaaagcccgcgcgcggactttcaacaggcgggaaaagtgacgtcacaacaagatgagtaaagatattcccacgccttacatgtggagctttcaaccccaaatgggactggcggccggcgcggctcaagactattctagcaaaatgaattggttaagcgccggaccccacatgatttccagggtgaatggggtacgagcccggcgtaaccaaatactgctagaacaagccgctctcaccgctacaccacgtaatcaacttaaccctccctcttggccagctgccctgatatatcaggaaaatccccctcctaccactgtacttttgcctcgcgacgcccaggccgaagtccatatgactaacgctggggcacagcttgcgggcggtgcacgtcacagtttcaggtataaaggtcgcactgagccctatccgtctccagctataaaaagagtactcatcagagggaaaggtattcagctgaacgacgaagtcacatcgccattgggagtcagacccgacggagtgtttcagctcggagggtccggacgttcctcctttaccgctcgtcaagcctacctgacactacagagctcatcctcagctccgagatctggtggtattggaactctccaatttgtggaggaatttactccatctgtttacttcaatcctttttcgggctcgcctggacactatcctgacgccttcatacccaactttgacgcagtgagtgaatctgtggatggctatgattaatgtctaatggagcggctgacagagcgcggctgcgacatttagaccactgtcgccaacctcactgctttgctcgagacatctgtgtctttacctactttgagcttccagaggagcacccccaggggccagctcacggtgtcagaataacagttgaaaaaggaattgatacacacctcattaaatttttcaccaaacgcccgctattggtggaaaaagatcaaggaaatactatattaactttatattgcatttgtcctgttcccggattacatgaagatttctgctgtcatttgtgtgctgaatttaatcatctgtagtggcgctgtaccgcctgaagaagaacctaactgtcatccgcatttaagcaacattaaaatcaacctttcgatccctcatatcactcttcgctgcagttttttttccacacatctcacctggacctttaacggaaaacacgttaccaatacagatataaagtttaaactacacaaagaaaacatcactctatttcaacctattaacctgggatactaccgctgctcagctccaccctgtacgcaagcattttttgttgctccagttattgacaaacgccctgctccgacaacagctgctgtcactgagcacatcaccgaggcagtttctccttctaaaggtacagaggaaattgtgtacttttcaaactttacaaaccacttagttttaaattgttcctgttctaactccttaatttcatggtttgctaacagctctctgtgcaaaactttctaccaaggaaaacttttgtattctgctaaactcacattgtgtaaccagagcaccccttcccaccttactctattgccaccttttgttgccggtcgttacttttgcataggagctgcacgtactagcccctgtcaacagcattggaatttaacttactgtcccccaccagtgtcgccctttgtgatcaatactgaatatttagactataatcccttgcttgcttacggcggtctcgcagctcttattttattcctgatttctaacttgtttctagtgcaacatttgtattcatactaacaatgctttccatttttcttttatttctcttttctttaccttctggcttgtatgctcaaacagccgaaagaccactaaaagtcgtggtggaagctggccataatgtaacccttccccacctttctggttcacaccaaactggccatgttacttggctagtagagacatcagattatggttcagcttctccagacaacttcattttcagtggacaaaaactatgccagtttactgacagaaccatggtgtggccttattacaatttacattttaactgtgaaaattatgaccttaatctgttttggcttaaggtggaaaattcggctatttacaacgttaaaaatacagtcaatgcttctgaaacaaatatttactatgatttaagagtagtacaaatttttccacctaaatgcatcattacttcaaagtaccttacaaacgattattgtcacattacaattaactgcactaactctgattaccccaataaggttgtgtttaataatgtcagtcgatggtactacggatacggtaagggcagcccaacccttcccaactactttataactaactttaatgtttcaggtattactaaaagctttaatcacacttacccttttaatgagctctgtgattatcccacatcccaatctcaacacagtttaacacatacagtaagcacagtaatctttttaggaataattggcttcagcattttgattattatagcagcctttatttatctgtgctggcatagaaaatctttgtgtgtttctaaaacagaacctcttatgccgattccttactagttttcttttttcttacagtatggtgacggttcttctcatctttttatgcctgccagtcattttttcttcttcgacttttgccgcagtcagtgaccttgatcccgagtgtttagccccctttgcggtgtacctgattttcacatttgtgactgctacctgcgtctgcagtattattactctgctaatcacctcgctccaattttttgattactactacgtgagaattgtttaccgcagacaccacccccgttaccaaaaccctcaaattgcggctcttttgcagctccaaccatgaaaacagcattagttcttttctttatgttaatcccagtttgggctagttcttgtcaactacataaaccatggaattttttagattgttatactaaagaaacaaactacataggctgggtttatggaattatgtctggcttagtatttgtctcctctgtagtttctttacaactgtatgcgcgccttaattttagttggaataagtatactgatgatcttcccgaatatccaaacccccaggatgatttacccctaaatattgtatttccagagcccccgcgtcctccttctgttgttagctattttaagttcaccggtgaagatgattgaacctgatctagaaattgatggaagaatcaccgaacagaggctcctcactgatcgcgctaggcgacgccaacaggatcaaaaaaataaagagttaattgatttacaaaccgtgcatcagtgtaaaaaaggacttttttgcctggtaaaacaagctacccttcgctatgaatctttaccaggcaaagaacatcaactgtgctacacgctgcccactcagcgacaaacctttactgcaatggtgggctcggtacctattaaagtgtcccaacaagcaggagaacaagaaggctctattcggtgcctatgtgataaccctgaatgtttgtacactttaataaaaacactgtgcggtttaagaaatcttttaccaatgaattaaataaattacttaccggaaatctgaaaatacatcatggtctccgtgtactcttataaaatttccctcttcccaactgtcaaacctgacagacttgcaaacagcaaactttctccaaatcttaaatggaaggtcagattcttcttcccaatccctacccaccatcttcatcttttctagatgaagcgcagcagaacccagtatgctgaagaaacagaagaaaatgatgacttcaaccccgtttacccttttgacccatttgacacatcagacgtaccctttgttacacccccttttacttcttccaatggtcttcaagaaaaaccaccaggtgtattagcacttaattacaaagaccccattgtaactgaaaatggaacccttacactcaagctaggggacggaataaaacttaatgcccaaggtcaacttacagctagtaataatatcaatgttttggagccccttaccaacacctcacaaggtcttaaactttcttggagcgcccccctagcagtaaaggctagtgccctcacacttaacacaagagcgcccttaaccacaacggatgaaagcttagccttaataaccgcccctcccattacagtagagtcttcgcgtttgggcttggccaccatagcccctctaagcttagatggaggtggaaacctaggtttaaatctttctgctcccctggacgttagtaacaacaatttgcatctcaccactgaaactcccttagttgtaaattctagcggtgccctatctgttgctactgcagaccccataagtgttcgcaacaacgctcttaccctacctacggcagatccgttaatggtgagctccgatgggttgggaataagtgtcactagtcccattacagtaataaacggttccttagccttgtctacaactgctcccctcaacagcacaggatccactttaagtctgtctgttgccaatcctctgactatttcacaagacacattgactgtttccactggtaacggtcttcaagtgtcggggtctcaattagtaacaagaataggggatggtttaacattcgataatggggtcatgaaagtaaacgttgccgggggaatgagaacttctggcggtagaataattttagatgttaattatccctttgatgcgagcaataacctgtccttaagacggggattgggactaatttataaccaatctacaaactggaacttaacaactgatattagtaccgaaaaaggtttaatgtttagtggcaatcaaatagctcttaatgcaggtcaggggcttacatttaataatggccaacttagggttaagttgggagctggacttatttttgattcaaacaataacattgccttaggcagcagcagcaacactccatacgaccctctgacactgtggacaactcctgacccaccaccaaactgcagcctcatacaagagctagatgcaaaactcaccctgtgcttaacaaaaaacggatctattgttaatggcattgtaagtttagtgggtgttaagggtaatctcctaaatatccaaagtactactaccactgtaggagtgcatttagtgtttgatgaacagggaagattaatcacatcaacccctactgccctggttccccaagcttcgtggggatatagacaaggccaatcagtgtctaccaatactgttaccaatggtctaggttttatgcctaatgtgagtgcttaccctagaccaaatgccagtgaggctaaaagccaaatggtaagtctcacgtacttacagggagatacatctaaacctataacaatgaaagttgcatttaatggcattacgtcgctaaatggatactctttaacattcatgtggtcaggtctatcaaactatataaatcagcctttctctacaccatcctgctccttttcttacattacccaagaataaaaacacacacaaaacacaaattgcgtacttattgtttatttttttttttttttacactatacgcgtggttaaactgcctccttcccattttaccttgtatacctccctttccccctttgtagctgaaaacaactgcacttgaatatttcgacttaggttttttggcgttagcgtccacacagtttctttacgggcaaagcgagggtcggtgatggaaacgaatccctcgcccgcacagtcactcaagcggcattccccatccaaaaccaggtccatgattttatcctacaaaaagtaacaacagtcagtgtccatcagccgcccaaggattctctcgttgattataatctccaaataaaattgctcgatgatgcataattaaaccctttagcagttgctgacgataacgttcatgccgactatgttttagagggcgaacagtgttttcagcaattacttgaacaacttttaacattagcagtctggtacgacgagcgcaacagcgcatgcgtatctcacttaagtctttacaataatcacaacacagcactaacatgttatttaaaattccataattaaaggcgctccatccaaaactaactttttctaacgctaaccaggcatggccatcatacataattttaaagtaaattaaatggcgacctctaacaaaggtgcttcccacatacatcacctctttaggcattaaatggttaacaacctcccgataccaaaaacaccttttgttaattaaggcgccatatacggccattttgaaccagcgtcccaaaagcatcccagctgacatacactgtagtgaacccggacgctggcaatgacaatgaataagccaccgctcatgaccatgtaataattgagtaacttcaacatttatagtggcacaacacatacatacactcatgtattttttcaaaataaacatctcataatcagttagaatcatatcccacggtattggccattcctgcagcactgtaaaacctacacatgaaggaatgcctcttacctcacttacattatgtaaagtcagactattacactcaggccataaagaattttccgaagtactcaacgtagcttttgactgttcctcacagggcggtagttggtacttgttgtatggtgccaatctgtagcgataccgtctgtcgcgctgcatcgtaaacaacagacttgcgagcgtcttcgtacttaaaaaaacaaaaccacgtacgaccactggttatcgcacctcgtcctttttgtttgcagcgttggcgttccgtcaaaaaagcaaagtacaaccactctcgcaggcttgctaaaatgtattcagcttcaggtgttatcttcaaatcatgatgtttaataaagcgcagagtatccacacaggatgcatgggctaaaccaagccatgctatgcaggcagccgtgtcccgacttacaggaggaggaggaatacaaggtagaggcataaaaacttaatcaagacggtcagcaaggatttgaatgcgtaaatctcgcaggtggcagcgatcgcctccgctgtgctggtgaaagatcacagccagatcaaattgtaagcgattttccaaatgttcaacaacagcttctaaaagagccacagctctgatttcgataaacaaaagcaaagcaaatgcattatcatgaaactcttctatcatcaaactgcctgactgaaccattcccaggtaattttcattcttccactgttgtattatttgaacacactgattttgcaggtttaaaccgtgaatattaaaaagctctgtaagggcgccctccaccgccatccgcaggcagtacttcatatttgctgaaaaaagtctggatcttcaaacacctgcagtaaattcagtagatttacattaggctccacaccttggtctcgcagctgacatcttaatgccagttgtataaaatcatacaaatcagaagccagcagcaaagaaagttcacctccaggtacaagttccggagttcccacagaacatacaacttgcacaaatggacccatattagtaagcgtggcgccaacgtagacatcgcgcataggaggagttaaataatgcattaccagcagccaaaactcaggtagcacgtctttaagaaacgtcaccacctcaaaatctaagccatgcaaatagttccgtaaagactccggaaacaacacggagtaatgaacaagcgacctctgaaacatgctttaggttagcctgaaaaataaaaatatgttaaattaaagatgcctggcaaacgggtggaaaaacaactctacttaaaagcaagcgcgcgactggctgctttgcgcgaacatcgcaaaacacgtcggaatgattaaacaacaaaacactgagctccattcttgagcctggataaagcgtttcagcgccaacaaaaacccctctggcgttcatgtcgcataatgaaaacaatgttcccaaatatccaggaggaatatcaactgctatgtgcaaatataaaagcacaactccatgtggaggtataacaaaattcgcaggagaaaataacacataagcattagagtcgccctcttgtttaggcaacatagccccaggtcccgtaaaatacacataaagagtctcaaaagcagccataatgccttaccagaaaaacagtacaaagccaggcacagcagacacaatctgccgcaagtgcgcacctttaatactgaaaaatagtgacgtaaatggccaaagttcgcctacacaacacaaaaaaaaccccaaaagcccgcgaaaaaaatcacttccgcatatgactcggcataatacggtgttctcacgacacgtcacatccggcgcgcccggctcccacgccgcgccccacttcctcatccgcccaaacttacaagcacgccaaagccacacctccacccaatcaaattacacactacgcccacttcattttaatattggcactagtccagtataaggtatattattagatagg

SEQ ID NO: 143 - DNA, 34775 bp, Human adenovirus type 34
catcatcaataatataccttatagatggaatggtgccaatatgtaaatgaggtgattttaaaaattgtggggtgtgtggtgattggctgtggggttaacggctaaacggggcggcgcggccgtgggaaaatgacgttttgtgggggtggagtttttttgcaagttgtcgcgggaaatgtgacgcataaaaaggctttttttctcacggaactactgacttttcccacggtatttaacaggaaatgaggtagttttgaccggatgcaagtgaaaattgctgatttgcgcgcgaaaactgaatgaggaagtgtttttctgaataatgtggtatttatggcagggtggagtatttgttcagggccaggtagactttgacccattacgtggaggtttcgattaccgtgttttttacctgaatttccgcgtaccgtgtcaaagtcttctgtttttacgtaggtgtcagctgatcgctacggtatttatacctcagggtttgtgtcaagaggccactcttgagtgccagcgagaagagttttctcctctgcgccggcagtttaataataaaaaaatgagagatttgcgatttctgcctcaggaaataatttctgctgagactggaaatgaaatactggagcttgtggtgcacgccctgatgggagacgatccggagccacctgtgcagctttttgagcctcctacgcttcaggaactgtatgatttagaggtagagggatcggaggattctaatgaggaagctgtgaatggcttttttaccgattctatgcttttagctgctaatgaaggattagaattagatccgcctttggacactttcgatactccaggggtgattgtggaaagcggtacaggtgtaagaaaattacctgatttgggttccgtggactgtgatttgcactgctatgaagacgggtttcctccgagtgatgaggaggaccatgaaaaggagcagtctatgcagactgcagcgggtgagggagtgaaggctgccagtgttggttttcagttggattgcccggagcttcctggacatggctgtaagtcttgtgaatttcacaggaaaaatactggagtaaaggaactgttatgttcgctttgttatatgagagcgcactgccactttatttacagtaagtgtgtttaagttaaaatttaaaggaatatgctgtttttcacatgtatattgagtgggagttttgtgcttcttattataggtcctgtgtctgatgctgatgagtcaccatctcctgattctactacctcacctcctgagattcaagcacctgttcctgtggacgtgcgcaagcccattcctgtgaagcttaagcctgggaaacgtccagcagtggaaaaacttgaggacttgttacagggtggggacggacctttggacttgagtacacggaaacggccaagacaataagtgttccatatccgtgtttacttaaggtgacgtcaatatttgtgtgagagtgcaatgtaataaaaatatgttaactgttcactggtttttattgctttttgggcggggactcaggtatataagtagaagcagacctgtatggttagctcataggagctggctttcatccatggaggtttgggccattttggaagaccttagaaagactaggcaactgttagaggacgcttcggacggagtctccggtttttggagattctggttcgctagtgaattagctagggtagtttttaggataaaacaggactataaagaagaatttgaaaagttgttggtagattgcccaggactttttgaagctcttaatttgggccatcaagttcactttaaagaaaaagttttatcagttttagacttttcaaccccaggtagaactgccgctgctgtggcttttcttacttttatattagataaatggatcccgcagactcatttcagcaggggatacgttttggatttcgtagccacagcattgtggagaacatggaaggttcgcaagatgaggacaatcttaggttactggccagtgcagcctttgggtgtagcgggaatcctgaggcatccaccggtcatgccagcggttctggaggaggaacagcaagaggacaacccgagagccggcctggaccctccagtggaggaggcggagtagctgacttgtctcctgaactgcaacgggtgcttactggatctacgtccactggacgggataggggcgttaagagggagagggcatctagtggtactgatgctagatctgagttggctttaagtttaatgagtcgcagacgtcctgaaaccatttggtggcatgaggtccagaaagagggaagggatgaagtttctgtattgcaggagaaatattcactggaacaggtgaaaacatgttggttggagcctgaggatgattgggaggtggccattaaaaattatgccaagatagctttgaggcctgataaacagtataagattactagacggattaatatccggaatgcttgttacatatctggaaatggggctgaggtggtaatagatactcaagacaaggcagttattagatgctgcatgatggatatgtggcctggagtagtcggtatggaagcagtaacttttgtaaatgttaagtttaggggagatggttataatggaatagtgtttatggccaataccaaacttatattgcatggttgtagcttttttggtttcaacaatacctgtgtagatgcctggggacaggttagtgtacggggatgtagtttctatgcgtgttggattgccacagctggcagaaccaagagtcaattgtctctgaagaaatgcatattccaaagatgtaacctgggcattctgaatgaaggcgaagcaagggtccgccactgcgcttctacagatactggatgttttattttaattaagggcaatgccagcgtaaagcataacatgatttgcggtgcttccgatgagaggccttatcaaatgctcacttgtgccggtgggcattgtaatatgctggctactgtgcatattgtttcccatcaacgcaaaaaatggcctgtttttgatcacaatgtgttgaccaagtgtaccatgcatgcaggtgggcgtagaggaatgtttatgccttaccagtgtaacatgaatcatgtgaaagtgttgttggaaccagatgccttttccagaatgagcctaacaggaatctttgacatgaacatgcaaatctggaagatcctgaggtatgatgatacgagatcgagggtgcgcgcatgcgaatgcggaggcaagcatgccaggttccagccggtgtgtgtagatgtgactgaagatctgagaccggatcatttggttattgcccgcactggagcagagttcggatccagtggagaagaaactgactaaggtgagtattgggaaaacttggggtggggttttcagatggacagattgagtaaaaatttgttttttctgtctttcagctgtcatgagtggaaacgcttcttttaaggggggagtcttcagcccttatctgacagggcgtctcccatcctgggcaggagttcgtcagaatgttatgggatctactgtggatggaagacccgtccaacccgccaattcttcaacgctgacctatgctactttaagttcttcacctttggacgcagctgcagccgccgccgccgcctctgttgccgctaacactgtgcttggaatgggttactatggaagtatcgtggctaattccacttcctctaataacccttctaccctgactcaggacaagttacttgtccttttggcccagctggaggctttgacccaacgtctgggtgaactttatcagcaggtggccgagttgcgagtacaaactgagtctgctgtcggcacggcaaagtctaaataaaaaaaaattccacaatcaatgaataaataaacgagcttgttgttgatttaaaatcaagtgtttttatttcatttttcgcgcacggtatgccctagaccaccgatctcgatcattgagaacacggtggattttttccagaatcctatagaggtgggattgaatgtttagatacatgggcattaggccatctttggggtggagatagctccattgaagggattcatgctccggggtagtgttgtaaatcacccagtcataacaaggtcgcagtgcatggtgttgcacaatatcttttagaagtaggctgattgccacagataagcccttggtgtaggtgtttacaaaccggttgagctgggaggggtgcattcggggtgaaattatgtgcattttggattggatttttaagttggcaatattgccgccaagatctcgtcttgggttcatgttatgaaggaccaccaagacggtgtatccggtacatttaggaaatttatcgtgtagcttggatggaaaagcgtggaaaaatttggagacacccttgtgtcctccgagattttccatgcactcatccatgataatagcaatggggccgtgggcagcagcgcgggcaaacacgttccgtgggtctgacacatcatagttatgttcctgagttaaatcatcataagccattttaatgaatttggggcggagagtacccgattggggtatgaatgttccttcgggccccggagcatagttcccctcacagatttgcatttcccaagctttcagttccgatggtggaatcatgtccacctggggggctatgaagaacaccgtttctggggcgggggtgattagttgggatgatagcaagtttctgagcaattgagatttgccacatccggtggggccataaatgattccgattacaggttgcaggtggtagtttagggaacggcaactgccgtcttctcgaagcaagggggccacctcgttcatcatttcccttacatgcatattttcccgcaccaaatccattaggaggcgctctcctcctagtgatagaagttcttgtagtgaggaaaagtttttcagcggttttagaccgtcagccatgggcattttggagagagtttgctgcaaaagttctagtctgttccacagttcagtgatgtgttctatggcatctcgatccagcagacctcctcgtttcgcgggtttggacggctcctggagtagggtatgagacgatgggcgtccagcgctgccagggttcggtccttccagggtctcagtgttcgagtcagggttgtttccgtcacagtgaaggggtgtgcgcctgcttgggcgcttgccagggtgcgcttcagactcattctgctggtggagaacttctgtcgcttggcgccctgtatgtcggccaagtagcagtttaccatgagttcgtagttgagcgcctcggctgcgtggcctttggcgcggagcttacctttggaagttttcttgcataccgggcagtataggcatttcagcgcatacagcttgggcgcaaggaaaatggattctggggagtatgcatctgcgccgcaggaggcgcaaacagtttcacattccaccagccaggttaaatccggttcattggggtcaaaaacaagttttccgccatattttttgatgcgtttcttacctttggtctccatgagttcgtgtcctcgttgagtgacaaacaggctgtccgtatccccgtagactgattttacaggcctcttctccagtggagtgcctcggtcttcttcgtacaggaactctgaccactctgatacaaaggcgcgcgtccaggccagcacaaaggaggctatgtgggaggggtagcgatcgttgtcaaccagggggtccaccttttccaaagtatgcaaacacatgtcaccctcttcaacatccaggaatgtgattggcttgtaggtgtatttcacgtgacctggggtccccgctgggggggtataaaagggggcggttctttgctcttcctcactgtcttccggatcgctgtccaggaacgtcagctgttggggtaggtattccctctcgaaggcgggcatgacctctgcactcaggttgtcagtttctaagaacgaggaggatttgatattgacagtgccggttgagatgcctttcatgaggttttcgtccatttggtcagaaaacacaatttttttattgtcaagtttggtggcaaatgatccatacagggcgttggataaaagtttggcaatggatcgcatggtttggttcttttccttgtccgcgcgctctttggcagcgatgttgagttggacatactcgcgtgctaggcacttccattcggggaagatagttgtcaattcatctggcacgattctcacttgccaccctcgattatgcaaggtaattaaatccacactggtggccacctcgcctcgaaggggttcgttggtccaacagagcctacctcctttcctagaacagaaagggggaagtgggtctagcataagttcatcgggagggtctgcatccatggtaaagattcccggaagtaaatccttatcaaaatagctgatgggagtggggtcatctaaggccatttgccattctcgagctgccagtgcacgctcatatgggttaaggggactgccccagggcatgggatgggtgagtgcagaggcatacatgccacagatgtcatagacgtagatgggatcctcaaagatgcctatataggttggatagcatcgcccccctctgatacttgctcgcacatagtcatatagttcatgtgatggcgctagcaaccccggacccaagttggtgcgattgggtttttctgttctgtagacaatctggcgaaagatggcgtgagaattggaagagatggtgggtctttgaaaaatgttgaaatgggcatgaggtagacctacagagtctctgacaaagtgggcataagattcttgaagcttggttaccagttcggcggtgacaagtacgtctagggcgcagtagtcaagtgtttcttgaatgatgtcataacctggttggtttttcttttcccacagttcgcggttgagaaggtattcttcgcgatccttccagtactcttctagcggaaacccgtctttgtctgcacggtaagatcctagcatgtagaactgattaactgccttgtaagggcagcagcccttctctacgggtagagagtatgcttgagcagcttttcgcagcgaagcgtgagtaagggcgaaggtgtctctgaccatgactttgagaaattggtatttgaagtccatgtcgtcacaggctccctgttcccagagttggaagtctacccgtttcttgtaggcggggttgggcaaagcgaaagtaacatcgttgaagagaatcttaccggctctgggcataaaattgcgagtgatgcggaaaggctgtggtacttccgctcgattgttgatcacctgggcagctaggacgatctcgtcgaaaccgttgatgttgtgtcctacgatgtataattctatgaaacgcggcgtgcctttgacgtgaggtagcttattgagctcatcaaaggttaggtctgtagggtcagataaggcgtagtgttcgagagcccattcgtgcaggtgaggatttgcatgtaggaatgatgaccaaagatccaccgccagtgctgtttgtaactggtcccgatactgacgaaaatgctggccaattgccattttttctggagtgacacagtagaaggttctggggtcttgttgccatcgatcccactttagtttaatggctagatcgtgggccatgttgacgagacgctcttctcctgagagtttcatgaccagcatgaaaggaactagttgtttgccaaaggaccccatccaggtgtaagtttccacatcgtaggtcaggaagagtctttctgtgcgaggatgagagccgatcgggaagaactggatttcctgccaccagttggaggattggctgttgatgtgatggaagtagaagtttctgcggcgcgccgagcattcgtgtttgtgcttgtacagacggccgcagtagtcgcagcgttgcacgggttgtatctcgtgaatgagctgtacctggcttcccttgacgagaaatttcagtgggaagccgaggcctggcgattgtatctcgtgctcttctatattcgctgtatcggcctgttcatcttctgtttcggtggtggtcatgctgacgagcccccgcgggaggcaagtccagacctcggcgcgggaggggcggagctgaaggaccagagcgcgcaggctggagctgtccagagtcctgagacgctgcggactcaggttagtaggtagggacagaagattaacttgcatgatcttttccagggcgtgcgggaggttcagatggtacttgatttccacaggttcgtttgtagagatgtcaatggcttgcagggttccgtgtcctttgggcgccactaccgtacctttgttttttcttttgatcggtggtggctctcttgcttcttgcatgctcagaagcgatgacggggacgcgcgccgggcggaagcggttgttccggacccggaggcatggctggtagtggcacgtcggcgccgcgcacgggcaggttctggtactgcgctctgagaagacttgcgtgcgccaccacgcgtcgattgacgtcttgtatctgacgtctctgggtgaaagctaccggccccgtgagcttgaacctgaaagagagttcaacagaatcaatttcggtatcgttaacggcagcttgtctcagtatttcttgtacgtcaccagagttgtcctggtaggcgatctccgccatgaactgctcgatttcttcctcctgaagatctccgcgacccgctctctcgacggtggccgcgaggtcattggagatacggcccatgagttgggagaatgcagtcatgcccgcctcgttccagacgcggctgtaaaccacggccccctcggagtctcttgcgcgcatcaccacctgagcgaggttaagctccacgtgtctggtgaagaccgcatagttgcataggcgctgaaaaaggtagttgagtgtggtggcaatgtgttcggcgacgaagaaatacatgatccatcgtctcagcggcatttcgctgacatcgcccagagcttccaagcgctccatggcctcgtagaagtccacggcaaaattaaaaaactgggagtttcgcgcggacacggtcaattcctcctcgagaagacggatgagttcggctatggtggcccgtacttcgcgttcgaaggctcccgggatctcttcttcctcttctatctcttcttccactaacatctcttcttcgtcttcaggcgggggcggagggggcacacggcgacgtcgacggcgcacgggcaaacggtcgatgaatcgttcaatgacctctccgcggcggcggcgcatggtttcagtgacggcgcggccgttctcgcgcggtcgcagagtaaaaacaccgccgcgcatctccttaaagtggtgactgggaggttctccgtttgggagggagagggcgctgattatacattttattaattggcccgtagggactgcgcgcagagatctgatcgtgtcaagatccacgggatctgaaaacctttcgacgaaagcgtctaaccagtcacagtcacaaggtaggctgagtacggcttcttgtgggcgggggtggttatgtgttcggtctgggtcttctgtttcttcttcatctcgggaaggtgagacgatgctgctggtgatgaaattaaagtaggcagttctaagacggcggatggtggcgaggagcaccaggtctttgggtccggcttgctggatacgcaggcgattggccattccccaagcattatcctgacatctagcaagatctttgtagtagtcttgcatgagccgttctacgggcacttcttcctcacccgttctgccatgcatacgtgtgagtccaaacccgcgcattggttgtaccagtgccaagtcagctacgactctttcggcgaggatggcttgctgtacttgggtgagggtggcttgaaagtcatcaaaatccacaaagcggtggtaagccccggtattaatggtgtaagcacagttggccatgactgaccagttaactgtctggtgaccagggcgcacgagctcggtgtatttaaggcgcgaataggcgcgggtgtcaaagatgtaatcgttgcaggtgcgcaccagatactggtaacctataagaaaatgcggcggtggttggcggtagagaggccatcgttctgtagctggagcgccgggggcgaggtcttccaacataaggcggtgatagccgtagatgtacctggacatccaggtgattcctgcggcggtagtagaagcccgaggaaactcgcgtacgcggttccaaatgttgcgtagcggcatgaagtagttcattgtaggcacggtttgaccagtgaggcgcgcgcagtcattgatgctctatagacacggagaaaatgaaagcgttcagcgactcgactccgtagcctggaggaacgtgaacgggttgggtcgcggtgtaccccggttcgagacttgtactcgagccggccggagccgcggctaacgtggtattggcactcccgtctcgacccagcctacaaaaatccaggatacggaatcgagtcgttttgctggttgccgaatggcagggaagtgagtcctattttttttttttgccgctcagatgcatcccgtgctgcgacagatgcgtccccaacaacagcccccctcgcagcagcagcaaccacaaaaggctgtccctgcaactactgcaactgccgctgtgagcggtgcgggacagcccgcctatgatctggacttggaagagggcgaaggactggcacgtctaggtgcgccttcgcccgagcggcatccgcgagttcaactgaaaaaagattctcgcgaggcgtatgtgccccaacagaacctatttagagacagaagcggcgaggagccggaggagatgcgagcttcccgctttaacgcgggtcgtgagctgcgtcacggtttggacagaagacgagtgttgcgggacgaggatttcgaagttgatgaagtgacagggatcagtcctgccagggcacacgtggctgcagccaaccttgtatcggcttacgaacagacagtaaaggaagagcgtaatttccaaaagtcttttaataatcatgtgcgaaccctcattgcccgcgaagaagtcacccttggtttgatgcatttgtgggatttgatggaagctatcattcagaaccctactagcaaacctctgaccgcacagctgtttctggtggtgcaacacagcagagacaatgaggctttcagagaggcgctgctcaacatcaccgaacccgaggggagatggttgtatgatcttatcaacattctacagagtatcatagtgcaggagcggagcctgggcctggccgagaaggtggctgccatcaattactcggttttgagcttgggaaagtattacgctcgcaagatctacaagactccatacgttcccatagacaaggaggtgaagatagatgggttctacatgcgcatgacgctgaaggtgttgaccctgagcgatgatcttggggtgtaccgcaatgacagaatgcatcgcgcggtgagcgccagcaggaggcgcgagttaagcgacagggaactgatgcacagtttgcaaagagctctaactggagctggaaccgagggtgagaattactttgatatgggagctgacttgcagtggcagcctagtcgcagggctctgaacgccgcgacggcaggatgtgagcttccttacatagaagaggcggatgaaggcgaggaggaagagggcgagtacttggaagactgatggcacaacccgtgttttttgctagatggaacagcaagcaccggatcccgcaatgcgggcggcgctgcagagccagccgtccggcattaactcctcggacgattggacccaggccatgcaacgtatcatggcgttgacgactcgcaaccccgaagcctttagacagcaaccccaggccaaccgtctatcggccatcatggaagctgtagtgccttcccgctctaatcccactcatgagaaggtcctggccatcgtgaacgcgttggtggagaacaaagctattcgtccagatgaggccggactggtatacaacgctctcttagaacgcgtggctcgctacaacagtagcaatgtgcaaaccaatttggaccgtatgataacagatgtacgcgaagccgtgtctcagcgcgaaaggttccagcgcgatgccaacctgggttcgctggtggcgttaaatgctttcttgagtactcagcctgctaatgtgccgcgtggtcaacaggattatactaactttttaagtgctttgagactgatggtatcagaagtacctcagagcgaagtatatcagtccggtcctgattacttctttcagactagcagacagggcttgcagacggtaaatctgagccaagcttttaaaaaccttaaaggtttgtggggagtgcatgccccggtaggagaaagagcaaccgtgtctagcttgttaactccgaactcccgcctattattactgttggtagctcctttcaccgacagcggtagcatcgaccgtaattcctatttgggttacctactaaacctgtatcgcgaagccatagggcaaagtcaggtggacgagcagacctatcaagaaattacccaagtcagtcgcgctttgggacaggaagacactggcagtttggaagccactctgaacttcttgcttaccaatcggtctcaaaagatccctcctcaatatgctcttactgcggaggaggagaggatccttagatatgtgcagcagagcgtgggattgtttctgatgcaagagggggcaactccgactgcagcactggacatgacagcgcgaaatatggagcccagcatgtatgccagtaaccgacctttcattaacaaactgctggactacttgcacagagctgccgctatgaactctgattatttcaccaatgccatcttaaacccgcactggctgcccccacctggtttctacacgggcgaatatgacatgcccgaccctaatgacggatttctgtgggacgacgtggacagcgatgttttttcacctctttctgatcatcgcacgtggaaaaaggaaggcggcgatagaatgcattcttctgcatcgctgtccggggtcattggtgctaccgcggctgagcccgagtctgcaagtccttttcctagtctacccttttctctacacagtgtacgtagcagcgaagtgggtagaataagtcgcccgagtttaatgggcgaagaggagtacctaaacgattccttgctcagaccggcaagagaaaaaaatttcccaaacaatggaatagaaagtttggtggataaaatgagtagatggaagacttatgctcaggatcacagagacgagcctgggatcatggggactacaagtagagcgagccgtagacgccagcgccatgacagacagaggggtcttgtgtgggacgatgaggattcggccgatgatagcagcgtattggacttgggtgggagaggaaggggcaacccgtttgctcatttgcgccctcgcttgggtggtatgttgtaaaaaaaaataaaaaagaaaaaactcaccaaggccatggcgacgagcgtacgttcgttcttctttattatctgtgtctagtataatgaggcgagtcgtgctaggcggagcggtggtgtatccggagggtcctcctccttcgtacgagagcgtgatgcagcagcagcaggcgacggcggtgatgcaatccccactggaggctccctttgtgcctccgcgatacctggcacctacggagggcagaaacagcattcgttactcggaactggcacctcagtacgataccaccaggttgtatctggtggacaacaagtcggcggacattgcttctctgaactatcagaatgaccacagcaacttcttgaccacggtggtgcaaaacaatgactttacccctacggaagccagcacccagaccattaactttgatgaacgatcgcggtggggcggtcagctaaaaaccatcatgcatactaacatgcccaacgtgaacgagtatatgtttagtaacaagttcaaagcgcgtgtgatggtgtccagaaaacctcctgagggtgttagagtagacgataattatgatcataagcaagatattctaaaatacgagtggttcgagtttactttgccagaaggcaacttttcggtcactatgactatcgacttgatgaacaatgccatcatagacaattacttgaaagtgggcagacagaatggagtgttggaaagtgacattggtgttaagttcgacactaggaacttcaagttgggatgggatccagaaactaagttgatcatgcctggggtttacacctatgaggccttccatcctgacatcgtattgctgcctggctgcggagtggactttaccgaaagccgtctgagcaaccttcttggcattagaaagaaacacccattccaagagggttttaagatcttgtatgaggatttagaaggaggaaatattccagcccttttggatgtagatgcttatgagaacagcaagaaagatcaaaaagccaaaatagaagctgctgcagaagctaaagcaaacatagttgccaacgatccggtaagggtggctaacgctagtgaaatcaggggagacagttttgccgcaacatccgttccgactaaagaatcattattggatgatgtgtctcaaaacatagagttaaaactcactattaagcctgtggaaaaagatggcaaaaacagaagttacaatgtgttggaagataaaatcaacacggcctatcgcagttggtacctttcgtacaattatggcgaccccgaaaaaggagtgcgttcctggacattgctcaccacctcagatgtcacctgcggagcggagcaggtctactggtcgcttccagacatgatgcaggatcctgtcactttccgctccactagacaagtcagtaactaccctgtggtgggtgcagagcttatgcccgtcttttcaaagagcttctacaacgaacaagctgtgtactcccagcagctccgccagtccacctcgcttacgcacgtcttcaaccgctttcctgagaaccagattttaatccgtccgccggcgcccacaattaccaccgtcagtgaaaacgttcctgctctcacagatcacgggaccctgccgttgcgcagcagtatccggggagtccaacgtgtgaccgttactgacgccagacgccgcacctgtccctacgtgtacaaggcactgggcatagtcgcaccgcgcgtcctttcaagccgcactttctaaaaaaaaaaaaaaaatgtccgttcttatctcgcccagtaataacaccggttggggtctgcgcgctcccagcaagatgtacggaggcgcacgcaaacgttctacccaacatcccgtgcgtgttcgcgggcattttcgcgctccatggggtgccctcaagggccgcactcgcgttcgaaccaccgtcgatgatgtaatcgatcaggtggttgccgacgcccgtaattatactcctactgcgcctacatctactgtggacgcagttattgacagtgtagtggctgacgctcgcaactatgctcgacgtaagagccggcgaaggcgcattgccagacgtcaccgagctaccactgccatgcgagcagcaagagctctgctacgaagagctagacgcgtggggcgaagagccatgcttagggcggccagacgtgcagcttcgggcgccagcgccggcaggtcccgcaggcaagcagccgctgtcgcagcggcgactattgccgacatggcccaatcgcgaagaggcaatgtatactgggtgcgtgacgctgccaccggtcaacgtgtacccgtgcgcacccgtccccctcgcacttagaagatactgagcagtctccgatgttgtgtcccagcggcgaggatgtccaagcgcaaatacaaggaagaaatgctgcaggttatcgcacctgaagtctacggccaaccgttgaaggatgaaaaaaaaccccgcaaaatcaagcgggtaaaaaaggacaaaaaagaagaggaagatggcgatgatgggctggcggagtttgtgcgcgagtttgccccacggcgacgcgtgcaatggcgtgggcgcaaagttcgacatgtgttgagacctggaacttcggtggtctttacacccggcgagcgttcaagcgctacttttaagcgttcctatgatgaggtgtacggggatgatgatattcttgagcaggcagctgaccgattaggcgagtttgcttatggcaagcgtagtagaataaatcccaaggatgaaacagtgtccatacccttggatcatggaaatcccacccctagtcttaaaccggtcactttgcagcaagtgttacccgtaactccgcgaacaggtgttaaacgcgaaggtgaagatttgtatcccactatgcaactgatggtgcccaaacgccagaagttggaggacgttttggagaaagtaaaagtggatccagatattcaacctgaggttaaagtgagacccattaagcaggtagcgcctggtctgggagtacaaactgtagacattaaaattcccactgaaagtatggaagtgcaaactgaacccgcaaagcctactgccacctccactgaagtgcaaacggacccatggatgcccatgcctattacaactgacgccgtcggtcccactcgaagatcccgacgaaagtacggtccagcaagtctgttgatgcccaactatgtcgtacacccatctattattcctactcctggttaccgaggcactcgctactatcgcagccgaaacagtacttcccgccgtcgccgcaagacacctgcaaatcgcagtcgtcgccgtagacgcacaagcaaaccgattcccggcgccctggtgcggcaagtgtaccgcaatggtagtgcggaacctttgacactgccgcgtgcgcgttaccatcctagtatcatcacttaatcaatgttgccgctgcctccttgcagatatggccctcacttgtcgccttcgcgttcccatcactggttaccgaggaagaaactcgcgccgtagaagagggatgttggggcgcggaatgcgacgctacaggcgacggcgtgctatccgcaagcaattgcggggtggttttttgccagccttaattccaattatcgctgctgcgattggcgcaataccaggcatagcttccgtggcggttcaggcctcgcaacgacattgacattggaaaaaaaaaaaacgtataaataaaaaatacaatggactctgacactcctggtactgtgactatgttttcttagagatggaagacatcaatttttcatccttggctccgcgacacggcacgaagccgtacatgggcacctggagcgacatcggcacgagccaactgaacgggggcgccttcaattggagcagtatctggagcgggcttaaaaattttggctcaaccataaaaacatacgggaacaaagcttggaacagcagtacaggacaggcgcttagaaataaacttaaagaccagaacttccaacaaaaagtagtcgatgggatagcttccggtatcaatggagtggtagatttggctaaccaggctgtgcagaaaaagataaacagtcgtttggacccgccgccagcaaccccaggtgaaatgcaagtggaggaagaaattcctccgccagaaaaacgaggcgacaagcgtccgcgtcccgatttggaagagacgctggtgacgcgcgtagatgaaccgccttcttatgaggaagcaacgaagcttggaatgcccaccactagaccgatagcccctatggccaccggggtgatgaaaccttctcagttgcatcgacccgtcaccttggatttgccccctcctcctgctgctactgctgtacccgcttctaagcctgtcgctgccccgaaaccagtcgccgtagccaggtcacgtcccgggggcgctcctcgtccaaatgcacactggcaaaatactctgaacagcatcgtgggtctaggcgtgcaaagtgtaaaacgccgtcgctgcttttaattaaatatggagtagcgcttaacttgcctatctgtgtatatgtgtcattacacgccgtcacagcatcagaggaaaaaaggaagaggtcgtgcgtcgacgctgagttactttcaagatggccaccccatcgatgctgccccaatgggcatacatgcacatcgccggacaggatgcttcggagtacctgagtccgggtctggtgcagttcgcccgcgccacagacacctacttcaatctgggaaataagtttagaaatcctaccgtagcgccgacccacgatgtgaccaccgatcgtagccagcggctcatgttgcgcttcgtgcccgttgaccgggaggacaatacatactcttacaaagtgcggtacaccctggccgtgggcgacaacagagtgctggatatggccagcacgttctttgacattaggggcgtgttggacagaggtcccagttttaaaccctattctggtacggcttacaactccctggctcctaaaggcgctccaaatgcatctcagtggttggataagggagttacaagcactggcctagtggacgacggcaatactgatgatggggaagaagccaaaaaagcaacatacacttttggtaatgctccagtaaaagccgaggctgaaatcacaaaagacggattgccggtgggcttggaagtttcaactgaaggtcctaaaccaatctatgctgataagctttatcagccagaacctcaagtgggagacgaaacttggactgacctagacggaaaaaccgaagagtatggagggagggttcttaaacctgaaactaaaatgaaaccctgctacggatcttttgctaaacctactaatattaaaggaggtcaggcaaaggtaaaaccaaaagaagacgatggcactaacaacatcgagtatgacattgacatgaacttctttgacttaagatcacaaagatcagaactcaaacctaaaattgtaatgtatgcagaaaatgtggacctggaatgtccagatactcatgttgtgtacaaacctggagtttcagatgctagttctgagaccaatcttggacaacagtctatgcccaacagacccaactacattggcttcagagataacttcatcggacttatgtactataacagtactggcaacatgggggtactggctggccaagcgtctcagttgaatgcagtggttgacttgcaggacagaaacacagaactgtcttaccaactcttgcttgactctctgggcgacagaaccagatactttagcatgtggaatcaggctgtggacagttatgatcctgatgtacgtgttattgaaaatcatggtgtggaagatgaacttcccaactattgttttccgttggatggtgtcggtccgcgaacagatagttacaaggagattaagccaaatggagaccaatctacttggacaaatgtagacccaactggcagcagtgaacttgctaagggaaatccatttgccatggaaattaaccttcaagccaatctatggcgaagtttcctttattccaatgtggctctatatctcccagactcgtacaaatacaccccgtccaatgtcactcttccagaaaacaaaaacacctacgactacatgaacgggcgggtggtgccgccatctctagtagacacctatgtgaacattggtgccaggtggtctctggatgccatggacaatgtcaacccattcaaccaccaccgtaacgctggcttgcgttaccgatccatgcttctgggtaacggacgttatgtgcctttccacatacaagtgcctcaaaaattcttcgctgttaaaaacctgctgcttctcccaggctcctacacttatgagtggaactttaggaaggatgtaaacatggttctacagagttccctcggtaacgacctacgggtagatggcgccagcatcagttttacgagcatcaacctctatgctacttttttccccatggctcacaacaccgcttccacccttgaagccatgctgcggaatgacaccaatgatcagtcattcaacgactacctatctgcagctaacatgctctaccccattcctgccaatgcaaccaatattcccatttccattccttctcgcaactgggcggctttcagaggctggtcatttaccagactgaaaaccaaagaaactccctctttggggtctggatttgacccctacttcgtctattctggttctattccctacctggatggtaccttctacctgaaccacacttttaagaaggtttccatcatgtttgactcttcagtgagctggcctggaaatgacaggttactatctcctaacgaatttgaaataaagcgcactgtggatggcgaaggctacaacgtagcccaatgcaacatgaccaaagactggttcttggtacagatgctcgccaactacaacatcggctatcagggcttctacattccagaaggatacaaagatcgcatgtattcatttttcagaaacttccagcccatgagcaggcaggtggttgatgaggtcaattacaaagacttcaaggccgtcgccataccctaccaacacaacaactctggctttgtgggttacatggctccgaccatgcgtcaaggtcaaccctatcccgctaactatccctatccactcattggaacaactgccgtaaatagtgttacgcagaaaaagttcttgtgtgacagaaccatgtggcgcataccgttctcaagcaacttcatgtctatgggagcccttacagacttgggacagaacatgctctatgccaactcagctcatgctctggacatgacctttgaggtggatcccatggatgagcccaccctgctttatcttctcttcgaagttttcgacgtggtcagagtgcatcagccacaccgcggcatcatcgaggcagtctacctgcgtacaccgttctcggccggtaacgctaccacgtaagaagcttcttgcttcttgcaaacagcagctgcaaccatggcctgcggatcccaaaacggctccagcgagcaagagctcagagccattgtccaagacctgggttgcggaccatattttttgggaacctttgataagcgcttcccggggttcatggcccccgataagctcgcctgtgccattgtaaatacggccggacgtgagacggggggagagcactggttggctttcggttggaacccacgttctaacacctgctacctttttgatccttttggattctcggatgatcgtctcaaacagatttaccagtttgaatatgagggtctcctgcgccgcagcgctcttgctaccaaggaccggtgtattacgctggaaaaatctacccagaccgtgcagggcccccgttctgccgcctgcggacttttctgctgcatgttccttcatgcctttgtgcactggcctgaccgtcccatggacggaaaccccaccatgaaattgctaactggagtgccaaacaacatgcttcattctcctaaagtccagcccaccctgtgtgacaatcaaaaagcactctaccattttctcaatacccattcgccttattttcgctctcatcgtacacacatcgaaagggccactgcgttcgaccgtatggatgtgcaataatgattcatgtaaacaacgtgttcaataaacagcactttattttttacatgtatcgaggctctggattacttatttatttacaagtcgaatgggttctgacgagaatcagaatgacccgcaggcagtgatacgttgcggaactgatacttgggttgccacttgaattcgggaatcaccaacttgggaaccggtatatcgggcaggatgtcactccacagctttctggtcagctgcaaagctcccagcaggtcaggagccgaaatcttgaaatcacaattaggaccagtgctctgagcgcgagagttgcggtacaccggattgcagcactgaaacaccatcagcgacggatgtcttacgcttgccagcacggtgggatctgcaatcatgcccacatccagatcttcagcattggcaatgctgaacggggtcatcttgcaggtctgcctacccatggcgggcacccaattaggcttgtggttacaatcgcagtgcagggggatcagtatcatcttggcctgatcctgtctgattcctggatacacggctctcatgaaagcatcatattgcttgaaagcctgctgggctttactaccctcggtataaaacatcccgcaggacctgctcgaaaactggttagctgcgcagccggcatcattcacacagcagcgggcgtcattgttggctatttgcaccacacttctgccccagcggttttgggtgattttggttcgctcgggattctccttcaaggctcgttgtccgttctcgctggccacatccatctcgataatctgctccttctgaatcataatattgccatgcaagcacttcagcttgccctcataatcattgcagccatgaggccacaacgcacagcctgtacattcccaattatggtgggcgatctgagaaaaagaatgtatcattccctgcagaaatcttcccatcatcgtgctcagtgtcttgtgactagtgaaagttaactggatgcctcggtgctcctcgttcacgtactggtgacagatgcgcttgtattgttcgtgctgctcaggcattagtttaaaagaggttctaagttcgttatccagcctgtacttctccatcagcagacacatcacttccatgcctttctcccaagcagacaccaggggcaagctaatcggattcttaacagtgcaggcagcagctcctttagccagagggtcatctttggcgatcttctcaatgcttcttttgccatccttctcaacgatgcgcacgggcgggtagctgaaacccactgctacaagttgcgcctcttctctttcttcttcgctgtcttgactgatgtcttgcatggggacatgtttggtcttccttggcttctttttcgggggtatcggaggaggaggactgtcgctccgttccggagacagggaggattgtgacgtttcgctcaccattaccaactgactgtcggtagaagaacctgaccccacacggcgacaggtgtttctcttcgggggcagaggtggaggcgattgcgaagggctgcggtccgacctggaaggcggatgactggcagaaccccttccgcgttcgggggtgtgctccctgtggcggtcgcttaactgatttccttcgcggctggccattgtgttctcctaggcagagaaacaacagacatggaaactcagccattgctgtcaacatcgccacgagtgccatcacatctcgtcctcagcgacgaggaaaaggagcagagcttaagcattccaccgcccagtcctgccaccacctctaccctagaagataaggaggtcgacgcatctcatgacatgcagaataaaaaagcgaaagagtctgagccagacatcgaacaagacccgggctatgtgacaccggtggaacacgaggaagagttgaaacgctttctagagagagaggatgaaaactgcccaaaacagcaagcggataactatcaccaagatgctggaaatagggatcagaacaccgactacctcatagggcttgacggggaagacgcgctccttaaacatctagcaagacagtcactcatagtcaaggatgcattattggacagaactgaagtgcccatcagtgtcgaagagctcagccgcgcctacgagcttaacctattttcacctcgtactccccccaaacgtcagccaaacggcacctgcgagccaaatcctcgcttaaacttttatccagcttttgctgtgccagaagtactggctacctatcacatcttttttaaaaatcaaaaaattccagtctcctgccgcgctaatcgcacccgcgccgatgccctactcaatctgggacctggttcacgcttacctgatatagcttccttggaagaggttccaaagatcttcgagggtctgggcaataatgagactcgggccgcaaatgctctgcaaaagggagaaaatggcatggatgagcatcacagcgttctggtggaattggaaggcgataatgccagactcgcagtactcaagcgaagcgtcgaggtcacacactttgcataccccgctgtcaacctgccccctaaagtcatgacggccgtcatggaccagttactcattaagcgcgcaagtcccctttcagaagacatgcatgacccagatgcctgtgatgagggtaaaccagtggtcagtgatgagcagctaacccgatggctgggcaccgactctccccgggatttggaagagcgtcgcaagcttatgatggccgtggtgctggttaccgtagaactagagtgtcttcggcgtttctttaccgattcagaaaccttgcgcaaactcgaagagaatctgcactacacttttagacacggctttgtgcggcaggcatgcaagatatctaacgtggaactcaccaacctggtttcctacatgggtattctgcatgagaatcgcctaggacaaagcgtgctgcacagcacccttaagggggaagcccgccgtgattacatccgcgattgtgtttatctctacctgtgccacacgtggcaaaccggcatgggtgtatggcagcaatgtttagaagaacagaacctgaaagagctaaacaagctcttacagaaatctcttaaggttctgtggacagggttcgacgagcgcaccgtcgcttccgacctggcagacctcatcttcccagagcgtctcagggttactttgcgaaacggactgcctgactttatgagccagagcatgcttaacaattttcgctctttcatcctggaacgctccggtatcctgcccgccacctgctgcgcactgccctccgactttgtgcctctcacctaccgcgaatgccccccgccgctatggagtcactgctacctgttccgtctggccaactacctctcctaccactcggatgtgatcgaggatgtgagcggagacggcttgctggagtgtcactgccgctgcaatctgtgcacgccccaccggtccctagcttgcaacccccagttgatgagcgaaacccagataataggcacctttgaattgcaaggccccagcagccaaggcgatgggtcttctcctgggcaaagtttaaaactgaccccgggactgtggacctccgcctacttgcgcaagtttgccccggaagattaccacccctatgaaatcaagttctatgaggaccaatcacagcctccgaaagccgaactttcggcctgcgtcatcacccagggggcaattctggcccaattgcaagccatccaaaaatcccgccaagaatttctactgaaaaagggtaagggggtctaccttgacccccagaccggcgaggaactcaacacaaggttccctcaggatgtcccaacgacgagaaagcaagaagttgaaggtgcagccgccgcccccagaagatatggaggaagattgggacagtcaggcagaggaagcggaggaggaggacagtctggaggacagtctggaggaagacagtttggaggaggaaaacgaggaggcagaggaggtggaagaagtaaccgccgacaaacagttatcctcggctgcggagacaagcaacagcgctaccatctccgctccgagtcgaggaacccggcggcgtcccagcagtagatgggacgagaccggacgcttcccgaacccaaccagcgcttccaagaccggtaagaaggatcggcagggatacaagtcctggcgggggcataagaatgccatcatctcctgcttgcatgagtgcgggggcaacatatccttcacgcggcgctacttgctattccaccatggggtgaactttccgcgcaatgttttgcattactaccgtcacctccacagcccctactatagccagcaaatcccggcagtctcgacagataaagacagcggcggcgacctccaacagaaaaccagcagcggcagttagaaaatacacaacaagtgcagcaacaggaggattaaagattacagccaacgagccagcgcaaacccgagagttaagaaatcggatctttccaaccctgtatgccatcttccagcagagtcggggccaagagcaggaactgaaaataaaaaaccgatctctgcgttcgctcaccagaagttgtttgtatcacaagagcgaagatcaacttcagcgcactctcgaggacgccgaggctctcttcaacaagtactgcgcgctgactcttaaagagtaggcagcgaccgcgcttattcaaaaaaggcgggaattacatcatcctcgacatgagtaaagaaattcccacgccttacatgtggagttatcagccccaaatgggattggcggcaggcgcctcccaggactactccacccgcatgaattggctcagcgccgggccttctatgatttctcgagttaatgatatacgcgcctaccgaaaccaaatacttttggaacagtcagctcttaccaccacgccccgccaacaccttaatcccagaaattggcccgccgccctagtgtaccaggaaagtcccgctcccaccactgtattacttcctcgagacgcccaggccgaagtccaaatgactaatgcaggtgcgcagttagcgggcggctccaccctatgtcgtcacaggcctcggcataatataaaacgcctgatgatcagaggccgaggtatccagctcaacgacgagtcggtgagctctccgcttggtctacgaccagacggaatctttcagattgccggctgcgggagatcttccttcacccctcgtcaggctgttctgactttggaaagttcgtcttcgcaaccccgctcgggcggaatcgggaccgttcaatttgtggaggagtttactccctctgtctacttcaaccccttctccggatctcctgggcactacccggacgagttcataccgaacttcgacgcgattagcgagtcagtggacggctacgattgatgtctggtgacgcggctgagctatctcggctgcgacatctagaccactgccgccgctttcgctgctttgcccgggaactcattgagttcatctacttcgaactccccaaggatcaccctcaaggtccggcccacggagtgcggattactatcgaaggcaaaatacactctcgcctgcaacgaattttctcccagcggcccgtgctgatcgagcgagaccagggaaacaccacggtttccatctactgcatttgtaatcaccccggattgcatgaaagcctttgctgtcttatgtgtactgagtttaataaaaactgaattaagactctcctacggactgccgcttcttcaacccggattttacaaccagaagaacgaaacttttcctgtcgtccaggactctgttaacttcacctttcctactcacaaactagaagctcaacgactacaccgcttttccagaagcattttccctactaatactactttcaaaaccggaggtgagctccaaggtcttcctacagaaaacccttgggtggaagcgggccttgtagtgctaggaattcttgcgggtgggcttgtgattattctttgctacctatacacaccttgcttcactttcctagtggtgttgtggtattggtttaaaaaatggggcccatactagtcttgcttgttttactttcgcttttggaaccgggttctgccaattacgatccatgtctagacttcgacccagaaaactgcacacttacttttgcacccgacacaagccgcatctgtggagttcttattaagtgcggatgggaatgcaggtccgttgaaattacacacaataacaaaacctggaacaataccttatccaccacatgggagccaggagttcccgagtggtacactgtctctgtccgaggtcctgacggttccatccgcattagtaacaacactttcattttttctgaaatgtgcgatctggccatgttcatgagcaaacagtattctctatggcctcctagcaaggacaacatcgtaacgttctccattgcttattgcttgtgcgcttgccttcttactgctttactgtgcgtatgcatacacctgcttgtaaccactcgcatcaaaaacgccaataacaaagaaaaaatgccttaacctctttctgtttacagacatggcttctcttacatctctcatatttgtcagcattgtcactgccgctcacggacaaacagtcgtctctatccctctaggacataattacactctcataggacccccaatcacttcagaggtcatctggaccaaactgggaagcgttgattactttgatataatctgcaacaaaacaaaaccaataatagtaacttgcaacatacaaaatcttacattgattaatgttagcaaagtttacagcggttactattatggttatgacagatacagtagtcaatatagaaattacttggttcgtgttacccagttaaaaaccacgaaaatgccaaatatggcaaagattcgatccgatgacaattctctagaaacttttacatctcccaccacacccgacgaaaaaaacatcccagattcaatgattgcaattgttgcagcggtggcagtggtgatggcactaataataatatgcatgcttttatatgcttgtcgctacaaaaagtttcatcctaaaaaacaagatctcctactaaggcttaacatttaatttctttttatacagccatggtttccactaccacattccttatgcttactagtcttgcaactctgacttctgctcgctcacacctcactgtaactataggctcaaactgcacactaaaaggacctcaaggtggtcatgtcttttggtggagaatatatgacaatggatggtttacaaaaccatgtgaccaacctggtagatttttctgcaacggcagagacctaaccattatcaacgtgacagcaaatgacaaaggcttctattatggaaccgactataaaagtagtttagattataacattattgtactgccatctaccactccagcaccccgcacaactactttctctagcagcagtgtcgctaacaatacaatttccaatccaacctttgccgcgcttttaaaacgcactgtgaataattctacaacttcacatacaacaatttccacttcaacaatcagcattatcgctgcagtgacaattggaatatctattcttgtttttaccataacctactacgcctgctgctatagaaaagacaaacataaaggtgatccattacttagatttgatatttaatttgttctttttttttttatttacagtatggtgaacaccaatcatggtacctagaaatttcttcttcaccatactcatttgtgcatttaatgtttgcgctactttcacagcagtagccacagcaaccccagactgtataggagcatttgcttcctatgcactttttgcttttgttacttgcatctgcgtatgtagcatagtctgcctggttattaattttttccaacttctagactggatccttgtgcgaattgcctacctgcgccaccatcccgaataccgcaaccaaaatatcgcggcacttcttagactcatctaaaaccatgcaggctatactaccaatatttttgcttctattgcttccctacgctgtctcaaccccagctgcctatagtactccaccagaacaccttagaaaatgcaaattccaacaaccgtggtcatttcttgcttgctatcgagaaaaatcagaaattcccccaaatttaataatgattgctggaataattaatataatctgttgcaccataatttcatttttgatataccccctatttgattttggctggaatgctcccaatgcacatgatcatccacaagacccagaggaacacattcccctacaaaacatgcaacatccaatagcgctaatagattacgaaagtgaaccacaacccccactactccctgctattagttacttcaacctaaccggcggagatgactgaaacactcaccacctccaattccgccgaggatctgctcgatatggacggccgcgtctcagaacagcgacttgcccaactacgcatccgccagcagcaggaacgcgcggccaaagagctcagagatgtcatccaaattcaccaatgcaaaaaaggcatattctgtttggtaaaacaagccaagatatcctacgagatcaccgctactgaccatcgcctctcttacgaacttggcccccaacgacaaaaatttacctgcatggtgggaatcaaccccatagttatcacccagcaaagtggagatactaagggttgcattcactgctcctgcgattccatcgagtgcacctacaccctgctgaagaccctatgcggcctaagagacctgctaccaatgaattaaaaaatgattaataaaaaatcacttacttgaaatcagcaataaggtctctgttgaaattttctcccagcagcacctcacttccctcttcccaactctggtattctaaaccccgttcagcggcatactttctccatactttaaaggggatgtcaaattttagctcctctcctgtacccacaatcttcatgtctttcttcccagatgaccaagagagtccggctcagtgactccttcaaccctgtctacccctatgaagatgaaagcacctcccaacacccctttataaacccagggtttatttccccaaatggcttcacacaaagcccagacggagttcttactttaaaatgtttaaccccactaacaaccacaggcggatctctacagctaaaagtgggagggggacttacagtggatgacactgatggtaccttacaagaaaacatacgtgctacagcacccattactaaaaataatcactctgtagaactatccattggaaatggattagaaactcaaaacaataaactatgtgccaaattgggaaatgggttaaaatttaacaacggtgacatttgtataaaggatagtattaacaccttatggactggaataaaccctccacctaactgtcaaattgtggaaaacactaatacaaatgatggcaaacttactttagtattagtaaaaaacggagggcttgttaatggctacgtgtctctagttggtgtatcagacactgtgaaccaaatgttcacacaaaagacagcaaacatccaattaagattatattttgactcttctggaaatctattaactgatgaatcagacttaaaaattccacttaaaaataaatcttctacagcgaccagtgaaactgtagccagcagcaaagcctttatgccaagtactacagcttatcccttcaacaccactactagggatagtgaaaactacattcatggaatatgttactacatgactagttatgatagaagtctatttcccttgaacatttctataatgctaaacagccgtatgatttcttccaatgttgcctatgccatacaatttgaatggaatctaaatgcaagtgaatctccagaaagcaacatagctacgctgaccacatccccctttttcttttcttacattacagaagacgacaactaaaataaagtttaagtgtttttatttaaaatcacaaaattcgagtagttattttgcctccaccttcccatttgacagaatacaccaatctctccccacgcacagctttaaacatttggataccattagagatagacattgttttagattccacattccaaacagtttcagagcgagccaatctggggtcagtgatagataaaaatccatcgcgatagtcttttaaagcgctttcacagtccaactgctgcggatgcgaatccggagtctggatcacggtcatctggaagaagaacgatgggaatcataatccgaaaacggtatcggacgattgtgtctcatcaaacccacaagcagccgctgtctgcgtcgctccgtgcaactgctgtttatgggatcagggtccacagtgtcctgaagcatgattttaatagcccttaacatcaactttctggtgcgatgcgcgcagcaacgcattctgatttcactcaaatctttgcagtaggtacaacacattattacaatattgtttaataaaccataattaaaagcgctccagccaaaactcatatctgatataatcgcccctgcatgaccatcataccaaagtttaatataaattaaatgacgttccctcaaaaacacactacccacatacatgatctcttttggcatgtgcatattaacaatctgtctgtaccatggacaacgttggttaatcatgcaacccaatataaccttccggaaccacactgccaacaccgctcccccagccatgcattgaagtgaaccctgctgattacaatgacaatgaagaacccaattctctcgaccgtgaatcacttgagaatgaaaaatatctatagtggcacaacatagacataaatgcatgcatcttctcataatttttaactcctcaggatttagaaacatatcccagggaataggaagctcttgcagaacagtaaagctggcagaacaaggaagaccacgaacacaacttacactatgcatagtcatagtatcacaatctggcaacagcgggtggtcttcagtcatagaagctcgggtttcattttcctcacaacgtggtaactgggctctggtgtaagggtgatgtctggcgcatgatgtcgagcgtgcgcgcaaccttgtcataatggagttgcttcctgacattctcgtattttgtatagcaaaacgcggccctggcagaacacactcttcttcgccttctatcctgccgcttagcgtgttccgtgtgatagttcaagtacagccacactcttaagttggtcaaaagaatgctggcttcagttgtaatcaaaactccatcgcatctaattgttctgaggaaatcatccacggtagcatatgcaaatcccaaccaagcaatgcaactggattgcgtttcaagcaggagaggagagggaagagacggaagaaccatgttaatttttattccaaacgatctcgcagtacttcaaattgtagatcgcgcagatggcatctctcgcccccactgtgttggtgaaaaagcacagctaaatcaaaagaaatgcgattttcaaggtgctcaacggtggcttccaacaaagcctccacgcgcacatccaagaacaaaagaataccaaaagaaggagcattttctaactcctcaatcatcatattacattcctgcaccattcccagataattttcagctttccagccttgaattattcgtgtcagttcttgtggtaaatccaatccacacattacaaacaggtcccggagggcgccctccaccaccattcttaaacacaccctcataatgacaaaatatcttgctcctgtgtcacctgtagcgaattgagaatggcaacatcaattgacatgcccttggctctaagttcttctttaagttctagttgtaaaaactctctcatattatcaccaaactgcttagccagaagccccccgggaacaagagcaggggacgctacagtgcagtacaagcgcagacctccccaattggctccagcaaaaacaagattggaataagcatattgggaaccgccagtaatatcatcgaagttgctggaaatataatcaggcagagtttcttgtaaaaattgaataaaagaaaaatttgccaaaaaaacattcaaaacctctgggatgcaaatgcaataggttaccgcgctgcgctccaacattgttagttttgaattagtctgcaaaaataaaaaaaaaaacaagcgtcatatcatagtagcctgacgaacaggtggataaatcagtctttccatcacaagacaagccacagggtctccagctcgaccctcgtaaaacctgtcatggtgattaaacaacagcaccgaaagttcctcgcggtgaccagcatgaataattcttgatgaagcatacaatccagacatgttagcatcagttaacgagaaaaaacagccaacatagcctttgggtataattatgcttaatcgtaagtatagcaaagccacccctcgcggatacaaagtaaaaggcacaggagaataaaaaatataattatttctctgctgctgttcaggcaacgtcgcccccggtccctctaaatacacatacaaagcctcatcagccatggcttaccagacaaagtacagcgggcacgcacaagctctaaagtcactctccaacctctccacaatatatatacacaagccctaaactgacgtaatgggagtaaagtgtaaaaaatcccgccaaacccaacacacaccccgaaactgcgtcaccagggaaaagtacagtttcacttccgcaatcccaacaagcgtcacttcctctttctcacggtacgtcacatcccattaacttgcaacgtcattttcccacggccgcgccgccccgtttagccgttaaccccacagccaatcaccacacaccccacaatttttaaaatcacctcatttacatattggcaccattccatctataaggtatattattgatgatg

SEQ ID NO: 144 - DNA, 23 bp, Artificial Sequence
  Synthetic polynucleotide
caacttttctatacaaagttgta

SEQ ID NO: 145 - DNA, 21 bp, Artificial Sequence
  Synthetic polynucleotide
caactttttaatacaaagttg

SEQ ID NO: 146 - DNA, 24 bp, Artificial Sequence
  Synthetic polypeptide
tcaactttgtatacaaaagttgtg

SEQ ID NO: 147 - DNA, 51 bp, Artificial Sequence
  Synthetic polynucleotide
acaactttgtataataaagttgctgaatcgtttgtgttatgtttcaacgtg

1. A method of making a recombinant adenovirus comprising assembling a nucleic acid from three or more adenoviral gene modules selected from the group consisting of an E1 module, an E2-L2 module, an L3-L4 module, an E3 module, and an E4 module.

2. The method of claim 1, wherein said nucleic acid comprises the E1 module.

3. The method of claim 2, wherein said nucleic acid further comprises the E4 module.

4. The method of claim 2, wherein said nucleic acid further comprises the E2-L2 module, the L3-L4 module, or both the E2-L2 module and the L3-L4 module.

5. The method of claim 1, wherein, prior to assembling said nucleic acid, a macromodule is formed by combining two of the three or more adenoviral gene modules.

6. The method of claim 5, wherein the macromodule is an E2-L4 macromodule.

7. The method of claim 6, wherein the method comprises assembling said nucleic acid from said E2-L4 macromodule and one or more adenoviral gene module selected from the E1 module, the E3 module, or the E4 module.

8. The method of claim 1, wherein the method comprises assembling said nucleic acid from at least four adenoviral gene modules selected from the E1 module, the E2-L2 module, the L3-L4 module, the E3 module, and the E4 module.

9. (canceled)

10. (canceled)

11. (canceled)

12. (canceled)

13. (canceled)

14. (canceled)

15. (canceled)

16. (canceled)

17. (canceled)

18. (canceled)

19. (canceled)

20. (canceled)

21. (canceled)

22. (canceled)

23. (canceled)

24. The method of claim 1, wherein said assembling comprises hybridizing a hybridization competent destination vector to one or more hybridization competent adenoviral gene modules thereby forming an adenoviral gene module vector.

25. The method of claim 24, wherein the hybridization competent destination vector is formed by:
(i) cleaving a destination vector thereby forming a linear destination vector, and
(ii) contacting said linear destination vector with an exonuclease thereby forming the hybridization competent destination vector.

26. The method of claim 24, wherein the one or more hybridization competent adenoviral gene modules are formed by:
(i) contacting an entry vector comprising one or more entry vector adenoviral gene modules with an endonuclease thereby forming one or more released entry vector adenoviral gene modules, and
(ii) contacting the one or more released entry vector adenoviral gene modules with an exonuclease, thereby forming the one or more hybridization competent adenoviral gene modules.

27. The method of claim 1, wherein assembling comprises contacting a recombination competent destination vector and one or more recombination competent entry vectors containing on or more of said adenoviral gene modules with an integrase thereby forming an adenoviral gene module vector.

28. (canceled)

29. The method of claim 1, wherein assembling comprises:
(i) hybridizing a hybridization competent destination vector to a hybridization competent first adenoviral gene module thereby forming a first adenoviral gene module vector; and
(ii) contacting said first adenoviral gene module vector and a recombination competent second adenoviral gene module entry vector with an integrase thereby forming a second adenoviral gene module vector.

30. (canceled)

31. A library comprising a plurality of different E1 modules, a plurality of different E2-L2 modules, a plurality of different L3-L4 modules, a plurality of different E3 modules, a plurality of different E4 modules, or a plurality of different of E2-L4 macromodules.

32. (canceled)

33. (canceled)

34. (canceled)

35. (canceled)

36. (canceled)

37. An adenoviral genome library prepared according to a method of one of claims 1 to 8.
